United States Patent Application Publication US 2009/0307807 A1 - sequence listing, part 4

SEQ ID NO: 19891 - DNA, 324 bp, Glycine max
  unsure (1)..(324): unsure at all n locations
tgtaatcgattacacacatactgtaatcgattaccagaagatatttttcttataatattctcaacagtcacatctttgtacttgattcttgaatggctgtcaaaggcctatatatgtgtgacttgngacacaaatttgctaagagattttcagaacaaaaaggtcttatcctcttaaaaagcaaaatcngtttatcctcttacaaattccttggctaaaacacttgtgattcaataaggaattanttgagtgctcacattgttcaatctatctctttcaagagagatnncttcttttcttcttcttcattctgaaaagggatta

SEQ ID NO: 19892 - DNA, 279 bp, Glycine max
  unsure (1)..(279): unsure at all n locations
gcttatgagagagtcaagatcaattgagaggaaaattattctatgctaaacaagccaacaaagggagagagaaggttgtcttcgaacccggagattgngtttgggtgcacatgagaaaagaaaggtntccggaacanaggaaatcaaagcttcaaccaaggggagatggaccatttcaagtgcttgaaagaatcaatgacaatgcttacaaagttgagctgccccgtgagtataatgttagttccaccttcaatgtctctgatatatctctttttgatg

SEQ ID NO: 19893 - DNA, 407 bp, Glycine max
  unsure (1)..(407): unsure at all n locations
acgacaataactgtctactcggatgtgtaattgagtcccgtaatatatcgagacgctcganattgaatgttgaacctatgagccaatncaaacgacaataactttttactcggatgtctgattgagtcccataatatatcgagacgctcgaaattgaatgttgaacctctgatccaattccaacgacaatcactttttactccgatgtccgattcagtggtgtaatatatcgggacgctcgacattgaatgttgaacttctgagccaattcaaacgacaataactttttactctgatgtatgatcgaatcccgaaatatatcgagacgctcgaaattgaatgttgaacctctgatccatttcaacgacaataacttttactcgatgtccgattatagacgaattatc

SEQ ID NO: 19894 - DNA, 362 bp, Glycine max
  unsure (1)..(362): unsure at all n locations
agctttgtttgtatntaaacgacaataactttntactcggatgtctgattgagtcccgtaatatatcgagaccgtcgaaattgaatgttgaagctctgagccaattcaaacgacaataacgttttactcggatgtctgattgagtcccgtcatataccgagaagctcgaaattgaatgttgaagctccgagccaatctaaacgacaataactttttactcggatgtctgattgagtcccgtaatatatcgagaccctcgaaattgaatgttgaagctctgagccaattcaaacgataataaacttttactcggatgtctgatagagtcccgtcatatatcgagacgctcgaaatcgaatgtt

SEQ ID NO: 19895 - DNA, 370 bp, Glycine max
  unsure (1)..(370): unsure at all n locations
agcttgtgttgttcttacgaatgatgacatggtcaattgaactctcagaatatgatattgcctacaagctgagaggtactatccgagcccaagtactagccaacttcattaatgaattccatcccccaccaccatatttcaagtaggaatggtggacgatgcatgtgtaaaactcttccaataggcacgggagtggtgttggggttattctcgaaggaccatggtacaatccttacattntggattcaaagccacatgcaattaggccgaatacgaagaactctttgcaggtttaaggctttccaaacaggttgatgctcaaagggtccggtgtcgaagcgactccaagatcgccgttgagtatatcaac

SEQ ID NO: 19896 - DNA, 412 bp, Glycine max
  unsure (1)..(412): unsure at all n locations
agcttctgttgtgnacatnttgacttgctntccaatctgacagtcaccacagattctgccttcttctattttcagattgcggatgcctttaacagcacctttgtcaatgattttcttcatgcctcttaagtgcagatgtccaaatctttgatgccatattctgacttcatcttctttggaggatagacatgtggaggagtagctggtttcttggggtgtccataagtaacaattgtcctttgatctgctgcccttcattagaacttcactcttctcatttgtcaccaagcattctgactttgtgaagtttacattgaacccttcatcacacagctgactgatgctgatccaagttgcagtcagtcccttcaccagcagtactttgttcagactangaagtccatcatgaact

SEQ ID NO: 19897 - DNA, 383 bp, Glycine max
  unsure (1)..(383): unsure at all n locations
agctttattcttttacaaaaatgaagctaaactntaaacaagaatgaagcttcgataccacttgttagacaagtggcctcagatatcttaagaaggggggttgaattaagatattacaaactattttcccaattaaaattctactttgattntaatgcaagttcaaagttcccttaaagattaatttctaaatgatgattcaaaataaccaaactgaatgtaaaagtaaagcaacaataaataaaagagtttaagggaagagagagtgcaaactcagttttatactggttcggccacacccttgtgcctacgtccagtccccaagcaacccacttgagagttccactaacttgcanaaaccctttacaagttctgaaccacac

SEQ ID NO: 19898 - DNA, 439 bp, Glycine max
agcttctaatctttgtacaagaatgaagctctgataccacttgttagacaagtggcctcagatatcttaagaagggggggttgaattaagatattccaaacttttctcctaattaaaaatctatcttactttctacttaagttatgaattcccttaatgacaatcttcttaaatattaattcacatgaagcaacttgaattatgaatataaagcaataataaataaaggagattaagggaagagaaaatgcaaactcacttttatactggttctgccacacccttgtgcctacgtccagtccccaagcaacccgcttgagagttccactaacttgtaaattccttttacaagttctaaacacacaacgacgaacccttctttgtgtttagagattctgtacaacaagagactcacagtctcttaatcccttatagaatg

SEQ ID NO: 19899 - DNA, 422 bp, Glycine max
  unsure (1)..(422): unsure at all n locations
agctntatttgttattttctcctgccaccattcaaaaattgtaaatgtatccttttccacggagcacaatagaatgatgattttgctgaattaaagtgtgtgacaaacattttacaatgaaattaagactttattgtaaaatatataattaaatcaatttcgttgttttgtttttttcatcttcactaatatgctggaattgtgattatatattacatcttcggttgtgaaanaagtaaagaatagaattactattacattatataaggcgactaaatataacatgtacaatagaaatacaatttttgttgtacaatgtacaacagaattatatttttattgtgcatcgtttattagcaaagaaatatataaatctttcactaaataaaattgagattatctgttatacaatagaatcttga

SEQ ID NO: 19900 - DNA, 450 bp, Glycine max
  unsure (1)..(450): unsure at all n locations
agcttcttggttaatatttcttaccacttcaacatgtcattcgaagtcaaaacctaagggtggtacttgggaagattangggtggcaatgtaagccttggccggacgagttgggctagatgactcaacccgctagcccatattgactcaccccgcctaacccaccaacctagcgggacaggttggctagccagccatccatacatacatatacatatatatacaaataggtgttttgtcttacttgtcactttgtatcttttaagtttatagtgctattcaaaaatcacaatatatatgtgctatcatctttatattattttataaatttaattcctttaatacaaatagacaaatttatattaaaattaaatctaggataaacaattaatatattntatgttctctagataaatctgttcatttgggataactttatagaataagatga

SEQ ID NO: 19901 - DNA, 365 bp, Glycine max
agtctttcgttgttcaatttcgagcgtctcgatatattatgcgcctgaatcggacatccgagtgaatagtcaagaccatttgaatttctggagaacttgcatcgttgaatttcgagcgtgtcgataaattatgcgcctgaatcggacctccatgttaacagttattgaccattggaatttctcgagagcttccgttgtgcaatgtcgagcgtctcgatgtattgtgcgcctgaatcggacctccgagtgaaaagttatgaccatttgagatcctcaagaagttacgttgttgaatatcgagcgtctcgatatattgtgcgcctgaatcggacctccgagtgaatagttatgaccattagaatttc

SEQ ID NO: 19902 - DNA, 263 bp, Glycine max
catatatacctcctcctctacataaccattaaaaagaactgtttcacattcatttgttgcaactcaaggtcaaaataagcaactaatgccaagatatacaaagagaatctttcatagatacaggagaaaaagtctttgtgtagtcgattccttctttgtgagtaaatccctatgcaacgagtcttgcctggtatctctcaatgttggctaatgaatcccttttggtcttaaaaacccatttacagccaagggcctttgcccta

SEQ ID NO: 19903 - DNA, 402 bp, Glycine max
  unsure (1)..(402): unsure at all n locations
agcttcaacaatggttagatggaccatntcaagtgcttgaaagaatcaatgacaatgcttacaaagttgagctgcccggtgagtataatgttagttccaccttcaatgtctttgatttacctctttntgatgcagatgtagaatccgatttgaggacaaatccttctcaagagggagagaatgatgaggacatgaccaagagcaagggcaaggatccacttgaaggacttggaggacctatgacaagggctagagcaaggaaagccaaggaagctcttcaacaagtgctgtccatactattngaatacaagcccaagtttcaaggagaatagtccaaggttgtgagttgtatcatggcccanatggaggatgactatatgacaccactcttgtctcaatttt

SEQ ID NO: 19904 - DNA, 348 bp, Glycine max
  unsure (1)..(348): unsure at all n locations
agcttgaagtgngtatcccacaatcttttcatagtagaataccggtaatgtgtctactatcattgtcatcattttttttcggtcattgaggtgccacttgagctgccaggtctctccacctttgggtgtattctttgaaagatctgtgcccctttttgcacatgttctgttgttgcatcctatccagaaccatatcaaaattgtactgatactgcctaacgaaggcaaccattaggtccttccaagaatggactcgggaaggttccaagttagtgtaccaggtaacagctaccccagtaagactttctttggaaggaatgtatcaacaatttctcatcttttgcgtat

SEQ ID NO: 19905 - DNA, 413 bp, Glycine max
  unsure (1)..(413): unsure at all n locations
tgtttgtattgttatcactatcaaattctccaatatagattgtgaacctatctttgtttttccaatatgaaaaatcatcaacccagaatgagtcaacattattntgttctctaatgccaggtctcataagataacaatacaaacaacatgtagcatcttttgatatattatattccaaccaattgctaaatttcaaaaaccaatcacgattaaactttcaaattagagtcttaaattgttgtattggaaaatcatgctctcttggctgacaaggttctttttgctaataaactcttcggatgttatcccaattattaggatgataacatgatattntgttcctctctcctagaatagcatgagaatattccagatcaacttctaagactctttgtttcacatatgactataat

SEQ ID NO: 19906 - DNA, 340 bp, Glycine max
  unsure (1)..(340): unsure at all n locations
agcttctgnttttcaantttgagcgtgtagatgacttatgtgcgcatatcgaacattcgtgggaaaacttatgaccattcgaatatctcgagagctaccgttgttcaatttcgagcgtctcgatatattatgacccccaatcggacatctatgtgaaaacgtatgaccattcgaatatctcgagagcgttcgctgttcaatttcgagcgtctagatgagttatgtcctcgaatcgaacattcgagtgaaaacttatgaccattcgattttctcgagagcttccgttgttcaatttcaagcgtctcgatatattattgttcccgaatcggacactctcgaa

SEQ ID NO: 19907 - DNA, 406 bp, Glycine max
  unsure (1)..(406): unsure at all n locations
agcttcagctgttctatttcgagcctctagatatattatgtccatgaatcagacatctgtgtgaaaagttatgaccattcgaatttctcgagagcttccgttgttcaatttcgagcatctcgatatattatgtcccagaatcggacatccgagtgaaatatatgaccattcgaatntctcgagagcttccgttgttcaatttcgagcatctcgatatattatgtcccagaatcggacattcgagtgaaatttatgaccattcgaatttctcgagagcttccattgttcaatttcgagcgtctagatgagttatgtctccgaattggatatctgcgtgaaaagttatgaccattcgaatttctcgagcgctctctttgntcaatatcgagtgtctcgatatattatg

SEQ ID NO: 19908 - DNA, 290 bp, Glycine max
  unsure (1)..(290): unsure at all n locations
tctgtctcaacggtatctacaccagctnggatagtatgatataatatcttcacagaggcgtcaaccgcttccaactcattcaatacaggaaatttaccaccagaacatctaactctaattatctcatatacaagatgctgcgaccttctaaaatctggagcccatgaatgtatgtcggccacattcaagtctgataacttctttgacgagccagagaatgctgctgtaaacaccctgcaaataaatacagtctacaccttaactccatacatagcttgcatcaaaacctt

SEQ ID NO: 19909 - DNA, 400 bp, Glycine max
ggcagcaagctttttatcttggccatgctggattgttaggagagatttcttggcatttgtgctcataaacgcaatatccaccactccttcattggtctgccaggtattgtgattacagcaggggagaataatcacattctcctctgacgacactttctgatactcatcactctttctgtttgttatgtcagagggaatgtcgacgatgaattccctgactagactttcatatcaatctcccaacttggtgacagtattcaacagtccagcaaccttgatgaggacatgatctccttgcgatccacagcatctcttaccagagctctgtgtaatgcaagtctcgcgtgatatacaaaattacacctttcaacatctgcaatggagtggaatgaaatgttgt

SEQ ID NO: 19910 - DNA, 445 bp, Glycine max
  unsure (1)..(445): unsure at all n locations
agcttccaagatttattatcaagattcattcaagaatccagagaagacctaattcagaattagttttaaaaagtttttttcaaaacctgagtaccacatgaaattttctcaaaaccctttaccaaagagtttttactctctggtaatcgattaccagattattgtaatcgattaccagtagcaaaataattntcaaaaagctttcaactgaatntacaatgttccaattgatttcaaaatgttctaatcgattacaatgttttggtaatcgattaccagtgtgtttgaacgttgaaattcaaattcaaatgtgaagagtcacatcctctcacaaaaaagctntgtgtaatcgattacactaatttggtaatcgataccagtgatagtttctgaacaaatcanaaaatgtaactcttcannatagttttaactttttttaaaatgg

SEQ ID NO: 19911 - DNA, 375 bp, Glycine max
  unsure (1)..(375): unsure at all n locations
agctntacatctaattcaatggccgcctgaatcccgagggtgcatgcttcgtactcggccatattgttggtacaatcaaaacctatcctagccgtgaaaggaatacaatgatcatccggtgatacaaggactgcccctactccgtggcccaaagcattaaacgccccatcgaagcacacaatccatttgtgtatgtcctcgtgcgtctgcttgtcttcaaacagggccatgatatcttcatatgggaactcggggtgcatcggccgataatccgggaggagttgctgggccaaataatccgctaatgcacttgcctttaccggcttttgggtgacgtacacgatatcgaattcagataatagtacctgccaccta

SEQ ID NO: 19912 - DNA, 369 bp, Glycine max
  unsure (1)..(369): unsure at all n locations
agcttctttgattgtctaagtgtggaccctctanggcaaggcggcattctccactattttcggagccccatgaatgtcattgcctagcgctgttcatgtgtcttccaccttcgagtctggagccccgcgaatgtgattgcctatctctatacgccaattctccattctccacttttattcggagccccatgaatgtcatcgccaagcgctgttcattcatcctccacccaaagagtatggagctaagcttcttgattgcctaagtgtggaccctctatggcaatcctccattctccactttgttcggagccccatgaatgtcattgcctatcactgttcatgtgtcctccaccttcgagtctggagccc

SEQ ID NO: 19913 - DNA, 386 bp, Glycine max
agcttcttattttcatatgatgcagatgggtttgtagctacctcatgcactcctctaatgactatggcatcatttctggcgctaaactgctgggagtcggaggccatcttctcaattaaatttctggcttcagcaagagtcatgtctccaagggctccaccactggcagcatctatcatacttctctccatattactgagtccttcataaaaatgttggacaagaagctgttctgaaatctgatggtgatggcaactggcacatagcttcttaaatcgatcccagtactcatacaggctctctccactgagttgtctaatacctgacatatcactcctgatggctgaggccctggaagcaaggaacaaatgttctaagaatactct

SEQ ID NO: 19914 - DNA, 441 bp, Glycine max
agcttgagttgtcttatgctctttttaaggctctgctcgacttacataaaagtctgacttacgagcctatttaaaagcttgcttaaagacgtcttttattaattaattattttaaaacctagtgaaatactaactaaaaaaagaaacttattaaatttcgtatgaataatgtacaaatctaaaaataattgataaacaaaattatattgaattcaagtcgttaaagcacaaagtctataaaaaaaataaaaatagcataatattaaaaaatgtatggattagagatgatttacactaatatagcctaacaaaaattattattagttaaattaacaatttctaatccacattttttaatatataattatattatatatgtttaaaaaaaatatatgcacaataatgtcatcttagtctactcaagccatatcttatataata

SEQ ID NO: 19915 - DNA, 243 bp, Glycine max
  unsure (1)..(243): unsure at all n locations
agcttcaacatttcttatcgagcgtttcgatatattacgggactgaatcagacatccgagtaanaagttatcgtcgttataatttgctcagagcttcggtattgcatttcgagcgtctcgatatattacgggactcaatcagacatccgagtaaaaagtttttgtcgttagaacttgctcagagcttccataatcaatatccagccgttccatatattactggactcaatcctacaaccgtgt

SEQ ID NO: 19916 - DNA, 386 bp, Glycine max
  unsure (1)..(386): unsure at all n locations
agccttccctctttttaccaattacccttcacccaatttaaatccatcttggccctttttccacaactctaataaatgggagagaaatgttcatctagaccatacaagtccctaatattatcagatcctacaatttgagctcctatggagcaaaacaatgtgtgtctcctagagagggcatcagctaccacatttgtttttccctttttgtatttgataacatatggaaattgctctatgtactctacccattntgcatgcctcttgtttaacttgctttgccctctaatgtacttaagtgattgatgatcactatgaatgacaaattccttggaaacaaggtaatgttcccaagtttggagggctcttattaaggcataaagctc

SEQ ID NO: 19917 - DNA, 442 bp, Glycine max
  unsure (1)..(442): unsure at all n locations
agctttgaatgctctattcaatggagttgacaagaatatcttcagactgatcaacacttgcacagtggccaaggatgcatgggagatcctgaaaaccactcatgaaggaacctccaaagtgaagatgtccagattgcaactattggctacaaaattcgaaaatctgaagatgaaggaggaagagtgtattcatgacttccacatgaacattcttgaaattgccaatgcttgcactgccttgggagagaggatgacagatgaaaagctggtgagaaagatcctcagatccttgcctaagaggtttgacatgatagtcactgcaatagaggaggcccaagacatctgcaacatgagagtagaagaactcattggntcccttcanacctttgagctangactctcggatagggctgaaaagaagagcaagaatctggcgttcgtg

SEQ ID NO: 19918 - DNA, 416 bp, Glycine max
tgcatgccagcctctattgcttttattcattcttacctggggctatctcaaaccttgtatttttgttgtctatgatattgcatacacctccttcagagtgaagtgtgtagcctctctccatcatttggccaatgcttagaagattgtcttttaggctgggaactagtaagacatcatggatgagtcgcgtacctttatttgtctccaccatgatagtgcctttgccttttgattcaaccacacttgtatttcccagttgaactatgactttgacagactcatcaatacttttaaaaatagtcttatccttggccatgtgattgctacatccactatccaagtaccagtttcctcccttttcttttatcgagtcttgagtggcgtagaacgtacattgttcttgatcatgctcctct

SEQ ID NO: 19919 - DNA, 410 bp, Glycine max
agcttcatatttgatttatgtgcaaccatatcccttaaagtcctctcacgaggtggaggttgtgccatgttctcagaatgtgcatgatcagaatgctcagaatcagaatgctcaatgaaattctgataccaatgccagatgtcgtacaggatgtcacgacatcacgcttcagaacatgcagattatctctgagtgtatgaacagattaaacatgtctataacacacgataattgctaacccagttcggtgcaacctcacctacatctgggggctaccaagccagggaggaaatccactaaaatagtgttagttcaaggtctaacagccactatttacaaccttctcacctaaccactacccgtgcgacctctacctatgagccactcttatatatgagaacccctctcac

SEQ ID NO: 19920 - DNA, 359 bp, Glycine max
agcttatctgttttgtccttcctcagtgtcctgaatcgatcatacaacaacttatcaggcagaattctcacgagcacccaacttcagagctttgaagaacttagctacactggaaatcctgagctttgtggtcctcctgtaacaaaaaattgcacagacaaggaagagttgacagagagtgcttctgttggacacggtgatggtaatttctttggaacatcagagtttgatatcggtatgggagttggatttgcagcaggattttggggtttttgtagtgttgttttcttcaacagaacttggaggcgtgcttattttcattatcttgaccacttgagagatctgatttatgtgataat

SEQ ID NO: 19921 - DNA, 440 bp, Glycine max
  unsure (1)..(440): unsure at all n locations
agcttctcacttattatgcagcatttcaatttgcaaaagagaacggcattgatcttgtgtcagttataacaagcactgttgcaggccctttcttcacggctaatgtactaacaagtgttaaagttctactgtcgccattaacaggtgattttatcattaatctacatcttattcgttcatacacattgaaatgacttattttagttaggtaactaccatcttagctaacttcgtccccagagaaaagaaagtgttatctattagtatgtctatgtatgtgttagaaatgaaagctatattactaaatgttatataagtgtatcaacattaagtattttatntcaataacttctattcaattcatgaatttgtgaacttcggtactatctcttatgccaagttcccncaatatattgtacctctatgcttctaagtgcatc

SEQ ID NO: 19922 - DNA, 343 bp, Glycine max
agcttgtttatttcacccatatgcttcttattggcttgtgggaccaaatcccatactacattccttttaaactcatttaattcatcatgcatagccaataaccaatgctcatcatgcaatgcttcatctatctttctaggttcaatatgagaaacaaaagccatgttattgcatacaattctaagtttagagtgggtggatactcccttagatatttcacctatgatgttttccacagagaggtctctatgagttctccactcctttgggagttctttatgatgtgtggcaatgacttacttgctttgttcaagatccttaaccattggttcatcttcaagtg

SEQ ID NO: 19923 - DNA, 379 bp, Glycine max
ggagaaccaagccaatcagaatgctagacgatttatagatgtgaatataggtaacaatggcggtaatgacggaccgaggcagaaccgggttgagggagtaaagctcaatgttcctcccttcaaaggtagaagtgatccagatgcctacctggactgggaaatgaagactgagcacatattttcctgcaatgactacactgatgcgcagaaagtcaagctagcagcagctgaattctccgactatgcccttgtttggtggcataaataccaaagagaaatgttgagagaggaacggcgagaggtagatacatggactgagatgaaaagggtgatgagaaaaaggtatgtgcccactatctataacagaaccatgcgacag

SEQ ID NO: 19924 - DNA, 236 bp, Glycine max
  unsure (1)..(236): unsure at all n locations
gcgcaaacactgaagagaccggcgggtagcaaactttcatcaanaanaaaatcatgacctttcgagcatgatatacaatccatgttggaggaatcatctcaatctgagatagacatagtnctccactacaacatcagcctgtccctactttccaaaatgctactggtccaagcaagccatatgttccttctcaaatgcaacaactacatgtgcattcacaacaaagacaactagca

SEQ ID NO: 19925 - DNA, 423 bp, Glycine max
atagaaactcagctttgctgcaatatttacaatagacctcctcactctcagctgtataatcaaccacagcatagcagttatgacctttccagcaacagatacagccctggatggatgaaccaccctaacctcagatggtccagccctcagcaacaacaacagcagcctgctccttccttccaaaatgctgctggcccaagcagaccatacattcctccaccaatccaacaacagcaacaaccccagatacagccaacagttgaggcccctccacaaccttccctcgaagaacttgtgaggcaaatgactatgcagaacatgcagtttcagcaagagaccagagcctccattcagagcttaaccaatcagatgggacaattagctacccaattgaatcaacaatagtcccagaattctgacaag

SEQ ID NO: 19926 - DNA, 407 bp, Glycine max
  unsure (1)..(407): unsure at all n locations
tactcagcttcgctcttgaacgggcgctatcctatcctatttctannncttttttttgtaanangnctaagggcgcgtttgcggccttgtcctgttttttgtccttgctctatcaaatccccttatctagattctcctctaaattctgagcgttttgatatatagtgggcctcaaatggacaaccataacaaaagttatgagcatttgaagtttacttgccctatctattgacatatctgttatcctatctaatatcttatctgttatcctatctaatatcttatttgatttccgatctattatcttatctattatcctatctaatatcttatttgatatcatatctggtacccaaattagagctatctgctatccagatccaatctaatatattattatccaaatc

SEQ ID NO: 19927 - DNA, 427 bp, Glycine max
  unsure (1)..(427): unsure at all n locations
caccatcacatgggggtagattggtgactctttactgtcttttcctccttttttgagagcctcaaacatttctgcaccaacgtcctccaagaagaatttcggcagaacggaccttccaactctgaagctcgaagctttgatcccaaagaagcatgccatgaccattatcttcaagcccatctcttttcccagcacacaaacaaaagggtatagaagaaccaaaactatggctcttataagcccccctgcctcaaaggccacgagcatgaaatatgggaacaaagaagaggatttcaacaacgcgttttcgacatcaaagatcaacgtgtgatcgttgaggtctgatcggtggattagagaggggaatttcanggtattgttaaactgtgttgttgcacccgaaaaagaatggctaatggttctgtgg

SEQ ID NO: 19928 - DNA, 419 bp, Glycine max
taatgaccctcaatctttcaatgattatagatccatctcccttattggtgtgtctataaaatcgtggctaaagttctggccaagaggctggcccttgtgttacctcatcttatagatgaaagacaaacggattttatgaaggggaggcacattcttcatggtgttttgattgccaatgaggttatagctgaggctaaggctagaaataaaccttgcatggtcttcaaagaggattttgaaaaggcgtatgattcggtttcttgtggttttcttgactacatgttgatgaggatgggcttttgtgaaagatggaggaaatggattaatggtttcctgtccactgcaaccatatccattttaattaatggaagtctgtttttggagatgccactcaacataatgttagaaccttaaaatgt

SEQ ID NO: 19929 - DNA, 331 bp, Glycine max
ttctgttataaaggttgatgaaagaggattgatgtggttctacactggtgacatatggagattccataaagatggttgccttgagatcattgatcggaaaaaggacatagttcaactcacacatggagaatatgtgtccttgggaacagtatcaatgtcggcttgtggaacgcacttcctttaatatttaataataatattatttaatacaggttgaggccgctgtttcttgcttccctttgtagacaatatcattgtgcatgctgatccttttcatagctactgtgtggcactccttgtatcttctcattctgcttcggagcattgtgct

SEQ ID NO: 19930 - DNA, 389 bp, Glycine max
  unsure (1)..(389): unsure at all n locations
ntatgatgttcaacagagactatgttgacataattgaagattgttcttgttgctcctaatgcctgatcgttatgaattgtaatctcacattagagtcttctatctttgtagtataattatgactcatctttttgacgcacaaattaaatntaaatatgtatctgacatagttgccattaatcgtattttaagtaagttatctatctttgtacgtttctttaatgtagtggcacgatgaccaagttatctatctttaattagtgttacttagtttataattaattattacttaacgcacataggccaaatctaattctatatattaattttaggtcaagatcaatcttattttaagtaacttaactatctttctatgtgtctaatgtgga

SEQ ID NO: 19931 - DNA, 434 bp, Glycine max
  unsure (1)..(434): unsure at all n locations
cttataattntcatatgataataaacttctacaaaaatgtacctagatccataatattccacaatgcaaagaatttaagaataaaacttcctaaattctttaataaagattctcacacacacattatatacacatacacatagagtatgattattatgtgaatgacaatcttatatgagaatgagaatagttaatttcaatcattggattgaaatgaaagatttagattaaaaatattttaaattcaaattanaacctcatgtaatcataaaatctctaagaaattaatcaaatatctaatttatcacgtccaaatatatcttanacctatcatcaccattatgatcatcagtccaccaccatcgccatgaccgttgtatgtcaccaccaacatgattgcgacagtggcagcaacaacgattatagtcattgtg

SEQ ID NO: 19932 - DNA, 424 bp, Glycine max
  unsure (1)..(424): unsure at all n locations
nntaaaacttgcattctaccctctgatcccttatttacttattgctttctctaattatggttacagaaggaccggctactttcaacccctcttgaacaataaggtttaaaatgtgagcacaacattggatatgaaaaaattcaccaccacttactaaaccattagcatgcaaaaaaagtctttccttcaaatagtcttgcattttatcattggaagaagcattatctagagttaatgaaaatactttctgctcaatcccccattcttccaaaaaaccatatataactttagccttctcacgccccgagtgtggaggaggaaaatgagaaaaattaagcattttactattcaacttccaatttgcatcaacataatgtgcagttaatgaaatataaccctcagaagtacaagatgtccacacatc

SEQ ID NO: 19933 - DNA, 421 bp, Glycine max
  unsure (1)..(421): unsure at all n locations
tctacaacaagctagaaatataaaacgttatcttttctcatctttaacacttccccctcaagctggagcatataaattgtgtgctccaagtttggaacatataaagtggatctgaggacctctcaaggacttggtcangatgtctgcaagctggttgttggacttaataaattcagtactgatttctttggactgcagcttttccagaacaaaatggcaatcaatctctataggtttagttctctcatgaaatacagaattagaagcgatgtgaagagctgcctgattatcacaatacaacttcatctgctgaatatcacaaaattttaattcttgaagttgtttaatccacaccaattcacaagtaacaagagccatagctctatattctgcttctacacttgatcaggcaacaacacac

SEQ ID NO: 19934 - DNA, 444 bp, Glycine max
  unsure (1)..(444): unsure at all n locations
ntcgcagataatgtcaatgccccaccgcatcccctgaatgtctcgtccgccccttggcctttctccatgtggggaatagatgtcatcggggccattgagcccaaggcctcgaatggtcatcgcttcatcctcgtagcaatagattatttcaccaagtgggtcgaggcggcttcatataccaatgtcacgaggaatgtggtggtcaggttcattaagaaagagatcatctgccgatatggtttgccaagaaagattatcacggacaacggcaccaacctgaataacaagatgatgggggaaatgtgcgaggagtttaaaatccagcatcacaattccacaccctaccggccaaagatgaatggagccgtggaagcagccaataagaatatcaaaaagattatccaaaagatgactgtgtcatacaaggattggcacgagatgctc

SEQ ID NO: 19935 - DNA, 405 bp, Glycine max
tataatatattgatacgctcgaaattaaacgtcggaaactcttgagaaattcaaatggtcataacttttcacacggatgtccgattcgggcgcataatatgtcgagaggctcgaaattgaacaacggaagctcttgagaaattcaaatggtcataacttttcacacggatgtccgattcaggagcatcacatatagagacgctcgaaattcaaatggtcataacttttcacactgatgttcgatacaagcttataatatattgatacgctcgagattaaacattggaaactctctagaaattcaaatggccataacttttcacactgatgtccgatttaagcgcataatatgtcgagaggctcgagattgaataacagaagctcttgagaaattcaacatggcat

SEQ ID NO: 19936 - DNA, 291 bp, Glycine max
  unsure (1)..(291): unsure at all n locations
gtcactatatgtgacgccccacaatcggacatncgacttaaatgttatgaccatctgaatttctcaagagcttccgttgttcaattctgagcgtcttcgtatgtgatttgtctgaatcggacatgcgtgtgaaaaagtatgaccatttgtatttctcaagagcttccgattgacaatttcaagcctctcgacatattatgcgcccgaatcggacatccgtgtgaaaagttatgaccatttgtatttctcaagagcttccgatgttcaatttcgagcctctcgacatattat

SEQ ID NO: 19937 - DNA, 468 bp, Glycine max
tcttggagtcttctatgcaatgcccttggggggtaggattactatattctctccccccttgaaaaggatttgatctcaaatccataggttcttgaaactcatggattctttcctcaacacctctaaaaagaataaaaacatatgtattagtgatgttgggtatgttagagtacgataaggactgaaaacccctttcttggccatcttcccatgagagaatatagttcctcaccaactcagtgagtggtgctacaagtatagaaaaatatgggataaacctttcgtaaaagtttgttaagatattgaagcccctaatttcccttatacatggcggagtaagctactcaagaatgacctttattctcttagggtccatgggaagcccttgatcactatttaaaaagttaaggaaagtaatggaataaaatataccttttttctttattttcatgttgattattcctacaa

SEQ ID NO: 19938 - DNA, 458 bp, Glycine max
  unsure (1)..(458): unsure at all n locations
ctttgatactntgaaacagaaactgacctctgctcccataatctttgctccaaattggacaatagattttgaaataatgtgtgatgcaagtgattatgcagtaggatcagttctgggtcaaaggaaaaataaaatttttcatgtcatacactatgaaagcaaggttttaaataaagctcaaataaattatgccacaactgagaaataattgcttgcaatagtatatgctttggaaaaatttagatcttatttgataggatctaaaattatggtttttactgatcatgttgctataagttatctgttagttaaagctgattctaaaccccaacttatccgatggattctgttgttgcaggaatttgacttaaagatcaaggataaaaagggaagtgaaaattatgtagttgatcatctgtctaggctgaccaatgatgaggtgatcacacaagaacctg

SEQ ID NO: 19939 - DNA, 424 bp, Glycine max
tggactcgatggggccgatgcatgttgaaagccttggacgaaagatgtatgcctatgttgttgtggatgatttctccagatatacctgagtcaattttatcagagagagatcacacacctttgaagtattcaaggagttgagtctaatactgcaaagagagagagatagtgtcatcatgagaatcacgagtgaccatggcagagagtttgaaaacagcaagtttactgaattctgcacgtctgaaggcatcactcatgagttctctgcagctcttacaccacaacaaaatggcatagttgaaaggaagaacaggactctgcatgaagctgctacggtcatgcttcatgctcaagaacttgcctataatctctgggctgaagccatgaacacagcatgctacatgcacaacagagtctcacttat

SEQ ID NO: 19940 - DNA, 398 bp, Glycine max
atactcaaccttctagatgagttatgtctgcgaatcggacatcctgtgatatgttattaccatttgaatttctcgagtgcgtggcgttgtttaatttcaagcgtctcgatattttatgtcctcaaatcagacatcggagcgaaatgttatgaccattcgaagttgtcgagagcttccgtttttcaatttcgagcgtctacatgagttatgtcaccgaatcatgacatctgagtgaaatgttatgaccattccaatgggtcgagagcttccgctgttcaatctcgagcgtctagatgagctatgtacccgaatcggacatacgcgttaaaagctgtgaccatgctgatatggcgagagctggcgctgttcaatcacgagcgtctcgtattattatgtcc

SEQ ID NO: 19941 - DNA, 339 bp, Glycine max
  unsure (1)..(339): unsure at all n locations
aaaaggtaatattgtagccgatgctctttctcggcgtcatgcattactttctatgcttgaaacacaattgattggtcttgaatgtctgaaaagcatgtatgaaaatgatgaaactnttggagaaattttacaaattgtgaaaaattttcagaaaatggtttctttagacatgaacgctgtcttttcaaagaaaacaaatcgtgtgtgcctaaatgttctactagaaatctgcttgcttgtgaagcacatgaaggagggttaatggggcattttggggtccaaaagactctataaacattacaagaacattnttattggcctcatatgaaaaaggatgtg

SEQ ID NO: 19942 - DNA, 243 bp, Glycine max
  unsure (1)..(243): unsure at all n locations
tgttgatgcaagaggagcatcccattgcatantttagtgagaaatcgaatggggctgctcttanctattctacatatgataaggaattgtatgccttattaagagctttgcagacttggcagtataatctcttgcccaaggaatttagtattcacagtgatcataagtctttgaatacttgaaggacaaggaaagttgacaagtgcatgccnatatgtggaattcttgacaattccccatgtg

SEQ ID NO: 19943 - DNA, 462 bp, Glycine max
  unsure (1)..(462): unsure at all n locations
agcttgtntaccccatgttgaatntgctttctttatagctgttcatagcaccactaattgttctccttttgaagttgtttatggttttaacccactaactcctcttgatcttttgcctatgcctaatgtttctgtttttaagcataaagaaagtcaagcacaggcggactatgtgaagaagcttcatgagagagtcaaagatcanattgagaggaaaaataaaagctatgctaaacaagccaacaaagggagaaagaagggtgtcttcgaacccggagattgngtntgggtgcacatgagaaaagaaaggtttccggaacanaggaaatcaaagcttcaaccaaggggagatggaccatttcaagtgcttganagaatcaatgacaatgcttacanagttgagctgcccggtgagtataatgttagttccaccttcaatgtctctgatnntatctcttttga

SEQ ID NO: 19944 - DNA, 455 bp, Glycine max
  unsure (1)..(455): unsure at all n locations
taattattcatgcactatgtgtattttaatgnttcaaaacngtgngttcttaaatctaaatagcttagttggagaattaaatttaaaaaataattataaaataattacataactcttcatgcgatattcacacctttataacataattagtagtatctaacaccttatattttgtatatataattttaaaaataattataggaattcattaatgtacacctacctatttttttagaagtagttactaaattacaataagattcttaaaatacatcccaggcctaagttgttaagattatgtttaataagatattttaggagtctataagttattttgactaaagtaaacttgtctaatacatgagtttantttttataaactaccttaagagaacttattttgataagttacttaaacttataaaagataagctaacttaaaagtttcttttcat

SEQ ID NO: 19945 - DNA, 467 bp, Glycine max
  unsure (1)..(467): unsure at all n locations
agcttcatacaactgagacatggtagaataatagngtactccaggcatngccgttngctgagatctcatcacccttacagactatcgaaaaaagcttttaatggaagtcaagagcacgaaactgcgctgataccattgactggtgaataggtcttccagtgggttgaacacctgaatactgtatttggaaagacctaaaagaaggataaaagtaagacttgcatatggaagaagaggtccattttctttgatatttcgtattggtttgatctagatgttagacattgtatcgatgttatgcatgtggagaaaanagtatgtgatagtgtcattgagacgctccttaacattcaatgcaagatgaaagatggtctgaatacccgtcatgatctatctgacatgggtatacgatcgcagttgcatccaaagtctggtgggaaaatatacttgcctccaacttgtcatac

SEQ ID NO: 19946 - DNA, 437 bp, Glycine max
tatagaatatataataaaagaactatgactattgaagaatcattcatgtttcctttgatgagtctaatgctatttctccgagaaaggatattttagatgatgttgcagaatctttagaatgaatgcatattcatggacaagattctaaagggaaagggaaaggaagcaatgaagatcctcccgaagaagatcatccccttgacaacattattggtgatatctcaaaaggggtaacaactagacattctcttaaagatttatgcaataatatggcttttttatctatgattgaacctagaaatataaatgaagccatattagatgatcattggatagttgctatgcaagaagaactaaatcagtttgaaagaaacaatgtgtgggaattagtaaagaaacctgaaaattgccctatcataggaacaaaatgggtattt

SEQ ID NO: 19947 - DNA, 462 bp, Glycine max
  unsure (1)..(462): unsure at all n locations
tgcaagctattaagcccaatcaaaacccacgtcgtcacatacccgcacacaatcgcggnccacgggtctactacggcacagcccgatgtaatcgcagcgaacccgtcaagcaggccgttacatccgtcaatcgcgttccaatggcccaccaataaccgcagtgctcccagccaatgccgtcgtgacagctgtcctccctatcgcgctccattgaccataatacccttcgctatagtgataaacgaaccagggttgaagccgtaccacccgaaccacaacataaacgaaccaagcacaactaaagacgcgctgtggccacgcaaagccacagaccggcccgtccggtcgaaccggncgattctcgggccttcaattaaagccccccacatgctcgctatcccgccaaccatgtgaacaacgcctgagcccgcaaagtcgatgactccagacccgaacaaaaca

SEQ ID NO: 19948 - DNA, 414 bp, Glycine max
  unsure (1)..(414): unsure at all n locations
agcttcaacattcaatttcgagcgtctcgataagttataggactcaatcaaacatccgagtgaaaagttatggtcgttggtattggctcaaagcttcaactatcaatttcaagcgtctcgatatgttacgggactcaatcagacatccgagtaaaaagttatggtcgtttgtattggctgagagcttcaactttcaatttcaagcgtctcgatatgttacgggactcaatcagacatccgagtaaaaagttatggtcgtttgtattggctcagagcttcaactctcaatttcaagcgtctcgatatgtnacgggactcaatcagacatccgagtaaaaatgtattgtcagtntgataggctcagaggttcaactttcaatgtctagcgtctcgatatgttacgggactcaatca

SEQ ID NO: 19949 - DNA, 431 bp, Glycine max
  unsure (1)..(431): unsure at all n locations
cgcttaaaggtactttcatacacagtaaataaatgaggaagaattcttctagagaaaataagttatgtattataatgtaaaattattttacattaatattcaattataaattaacatatatgataaatttgttgatatttataataactaccttgaaaatcgtaataataacgatattttattagtttagtataaaattattttaatttgtcatgactattaaattctttaaatatttaatataccactattttcataatgaatgatattatggtgatcagtgttatgaacaattttaataaatgtaaatgttaattccttcgccttaacttcaataacttacaaattntataaatgtcattgttttatttgaataatataacatttgaattaacataaaggtcaaaggatgatcgtctatttagcttaat

SEQ ID NO: 19950 - DNA, 425 bp, Glycine max
  unsure (1)..(425): unsure at all n locations
tgaagagaatgcaagagagaggataaggaaacctattattttaacatggaaagaaataaaggagtttataaggaagatattcttaccaccttattatgagaaatatgtttatgataggctacaaaacctcacaaaaggtagcaaaagtcttgaagaataccataaagagatgataatgaccattaggaaagccaatgtacaagagcctaaaacttccataacaaggttcctatgtgggcttaataaagacattcgatgcattgtgaagttacaacactataagagcttggaggatatggtgcatcaagccaagaaagtggaaagacgacttgagaggaagcattcctacaagaagacctatcaccatgactcttcccgtggtaaggacaagtctaagaaatagggatcttccncacctgtaacat

SEQ ID NO: 19951 - DNA, 469 bp, Glycine max
  unsure (1)..(469): unsure at all n locations
agcttaatgagtttcttgtgtggtctcttgattaaattgatgcatgtttaaaaaagtatcatgtcccagacgaaagtatttctctattcagtgttttctgcagatatggngaacgggatgactcanaatccataatgacagattgctcctcttcagtatcatctggtctggactcagattggtgttgttatatcaagttgagaatgaaagaaaaaggactaatcctattagtagtcatcagatagatgaactatgtttggatgaatcgttgcgatttgagacattaaatcaagtagttgaggctgcgccagattcctctacccttgccaaaacctttgattntgttatgtcaaaagatgctggaagatccagtgacttagcanacgcaagtntgtccatgagtgagttttcggtcanaagccagcaccggtgcgctacaatgagaaaccttctggagtctcttatcaca

SEQ ID NO: 19952 - DNA, 433 bp, Glycine max
tctagtctcaattgtgagggtctcgatatattacccggttcattcggacatccaagtaaaaagttattgttggctgaatttcctatgagcttcggttttcaatttgtagcgtctcgatatattacaggactcaaccggacatccgtgtataaagttattgtcatttcaattttctcagagcttcggatctaaattttgagcgtctcgatatatgacgggactcaatcagacatccgagtcaaaagttattgtcgtttgaatttgatacgagcttccgttttcaatttggagcatccctcgataaattacaacactctgtcgggcatccgagtaaaaagttattgttgtttgaattttctaacacgtttcgttttcaatttggagcgtctcgatatattacgggactcaaccggacatccgtgtatacagttat

SEQ ID NO: 19953 - DNA, 474 bp, Glycine max
  unsure (1)..(474): unsure at all n locations
agcttctaaactntgacaagaatgaagctctgataccacttgttagacaagtggcctcagatatcttaagaaggggggggttgaattaagatattcgaaactttntcttctaattaaaaatctatcttactttntacttaagttatgaattcccttanagacaatcttcttanatattaattcanatgaagcaacttgaatatgaatataaagcaataataaataaaggagattaagggaagagaaaatgcaaactcagttntatactgggtcggccacacccttgtgcctacgtccagtccccaagcaacccgcttgagagttccactaacttggaaattccttntacaagttctaaacacacaaggacaacccttcctttgtggtagagattctnacaacaagagactcacagtctcttaatcccttagagaatgagaagaagaagaggaacanatctctcttgaaagagat

SEQ ID NO: 19954 - DNA, 435 bp, Glycine max
  unsure (1)..(435): unsure at all n locations
tcagcacttctgtagggtttcagggctttccatcagctctgtattaatctgccatatactcagccggtattaggcctcatgagctttctcatattcagctgcttactggatttagcttgggtggcttcccttttagatacttgggtgttccccttttatcatctagattaaatgtatatcactatgctcccttgctttccaagattactggcctgattcagggatggagcaggaagtctttatcttatgcaggtaagctagagttgatcagagcagttattcaaggaattgtgaatttctggatggggatttttcctttgcctcaatctgttctggaccggatcaaggcttcatgccgtaattntctgtggggcaaagcggatattggcaaanacaagcccttggttgcttggtcagtagtttgttctccgaaaa

SEQ ID NO: 19955 - DNA, 440 bp, Glycine max
  unsure (1)..(440): unsure at all n locations
agcttgagcacctccttccttacctcttccttcattgttgggttcagccttctctgaagttgtcggactggcctgtagtcttcttccatcattatcttgtgcatgcagtaagcagggctaatacctttaagatccgatatatgccacccaattgcttccttgtgtttcttcagaatttctactaacttgttttcttcatcggatgtgagtgtattgctgatcaccataagcttactctcatcttcttctangaacacatgcttcagatgggtgggaaatatcttcaattctaccttcttcttcttagatggagtcttgctctttagttcctcanaactggcctcctcctcanggatgttatcttgtcgatccaagtcttctaagcaagccttgagatcttcttcttcttcattggttaagcaatctatcgcattcaccat

SEQ ID NO: 19956 - DNA, 427 bp, Glycine max
  unsure (1)..(427): unsure at all n locations
tgtcatactttgtccaanaaagagaaaatcagtttttgcctgtgtctgcgccgggttaaagtcctacaaggatactcttcaaatattaagagccttgtgcagttgaagaagcttaacctagtggggttaaagtctcatgattgtcacatgttgatgcaacaattgttagccgtggccatacgagacattttgcctaacaaagtcaggttagccataactcgcctgtgctttttcttcaatgccatgtgtagcaaagtccttgatcctgtcaagtttgatgacctggaaaacaaggctacaattatactgtgccagttggagatgtattttcctcctgctttctttgacatcatggtccacttaattgtttaactggtcagagaaatcaaatgttgtggtcctgtatatctgtgctagatgtacccgg

SEQ ID NO: 19957 - DNA, 438 bp, Glycine max
  unsure (1)..(438): unsure at all n locations
ntctccactaagtagcctgatgcctgaaatgtcttttctgattgtgtggtcctagatgcagggaagattttctccaagaacaccctcttaaggtcatcccagctgaaaacggacctgggagcaaggtagtatatccaatcttttgtcactccctccagagaatgaggaaaagcctttagaaagatatgatcttcttggacatcaaggggcttcatggtggaacaaaaaatatggaactccttaagatgcttatgaggatcttcacctgcaagaccatgaaactttggcagcaaatgtattactccagtcttgagaacatatgaaacaccctcatcatgatattgaatgcacaagctttcataagtgaaatcaggtgtagccatctccctaagagtcctcttacgaggtggaggttgagccatgttctcagtatgaaaa

SEQ ID NO: 19958 - DNA, 434 bp, Glycine max
  unsure (1)..(434): unsure at all n locations
agcttctgttgtgacatcttgacttgcttcccaatctgacattcaccacagattctgcctttntctattttcagattgagaatgcctctaacagcacctttgtcaatgattntcttcatgcctcttaagtgcagatgtccaaatctttgatgccatattttgacttcatcttctttggaggatagacatgtggaggagtaactggtttcttgaggtgtccataggtaacagttgtcctttgatctgctgcccttcattagaacttcactcttctcatttgtcaccaagcattctgactntgtgaagtttacattgaatccttcatcacacaactgactgatgctgatcaagtntgcagtcagtcccttcaccagcagtactttgttcagactangaagtccatcatggactagctntcccattccagtgatctt

SEQ ID NO: 19959 - DNA, 390 bp, Glycine max
  unsure (1)..(390): unsure at all n locations
agcttgtatgatgcttcattggaggaaaagaaagagggagataaagatagaggtgggagcacgaaattgaaggaataanagagggagagaagtggaactttgatgaatgagagtgatgcaagctccattggagcttgtatgcctangatcttcttcatcagtggattcctttgcttcttggaagataaatggccgcggaatggagaaggaagagagagaggagacgccgcttcaatgagaagataagtctagaagaagctcaccaccatacgaggccatggataagagcttggaggacgaaagagatgaatgaagggaggtggagagaagagcacgatattctgtgctcagatagagctctgagatctaaagttaatattcanatgatca

SEQ ID NO: 19960 - DNA, 439 bp, Glycine max
taagaggccatggagattgagatggagacagacacgtgtggtttatagatttcacctgtattagttttctcaaacattatctttgcccccaattacatgattagatagccttgtgacaatcaagggagtaccattacataaaccttcaatttgatctaaattccttaaaagcatcattggtgtgccaatcttcaatttgattttatgatttggaaggccgatgttccaagagaatttgaaaattcaagggttaaagcctcgaatatttggtcttcatttgattataaattgtcaaaagaatctaagcttagatattgtttttcaactataacataattgtaaacaatttaactaatttgattgtttcaaatgaaagatatttgtgtaactttttcaaatggtagatgagattacatcgatttaaagataatacatattc

SEQ ID NO: 19961 - DNA, 341 bp, Glycine max
  unsure (1)..(341): unsure at all n locations
agctnatagccaattcanacgacanataacttttacgcgaatgtctgattgagtcctgtaatataacgagacgctcgaaattgaatgttgaacctctgagccaattcaaacgacaataaccttttacacggatgtctgattgagtcccgtcatatatcgagacgctcgaaattgaaagttgaatctctgagccaatccaaacgacaataactntntactcggatgtctgattgagtcccgtaatataacgagacgctcaaaattgaatgttgaagctctgagccaattcaaacgacaataactntntacacggatgtctgattgagacccgcatatatcga

SEQ ID NO: 19962 - DNA, 466 bp, Glycine max
taaatattcaatttcgagcgtctcgatatattacgagtctcattcaaacatccgagaaaaaagttattgtcgtttgaatttgctcagaggttcaacattcaatttcgagcgtctcgttatattacaggactcaatcagacatccgagtaaaaagttattgtcgtttgaattggctcagagcttcaacattcaatttcgagcgtctcgatatatgacaggacgcaatcagacatccgtgtaaaaagttattgtcgtttgaattagctcagaggttctacattcaatttcgagcgtctcattatattacaggactcaatgagacatctgactaaaacgttattgtcgtttgaattggctcagagcttcaacattcaatttcgagcgtctcgatatatgacatgactcaatcagacatccgagtaataagttattgtcgtttgaattggctcagaggttcaacattcaa

SEQ ID NO: 19963 - DNA, 407 bp, Glycine max
  unsure (1)..(407): unsure at all n locations
agctnagattgctctattcaatggagtngacaagaatatcttcagactgatcaacacttgcacagtggccaaggatgcgtgggagatcctgaaaaccactcatgaaggaacctccaaggtaaagatgtccagactgcaactattggctacaaaattcgaaaatctgaagatgaaggaggaagaatgtattcatgacttccacatgaacattcttgaaattgccaatgcttgcactgccttgngagagaagatgacagatgaaaagctggtgagaaagatcctcagatccttgcctaagagatttgacatganagtcactgcaatagaggaggcccaagacatttgcaacatgagagtggatgaactcattggttcccttcaaacctttgagctaggactctcggata

SEQ ID NO: 19964 - DNA, 461 bp, Glycine max
  unsure (1)..(461): unsure at all n locations
nttgcaagttggaatcatttatcctatctccgacttccaattggtgagtcccgtccaggtagttacgaagaaaaccggcctcgccgtgataaaatatgagaaggatgagttgattcctactcgggtgtagaacagttggagagtatgcaacgactataggaggctgaaccaggttaccaaaaaggaccattttccactgtcattcattgaccagatgcttgaaagcctggcaggtaaatctcactactgtttccttgatggtttttctggttatatgcaaatcactattgcttctgaggatcaggaaaagaccacattcaccttccccttcggcacttttgcctataggaggatgcctttcgacttgtgcaatgcccctggtaccttccagcagtgcatgattatgtattttagtgattttttagaaaattgcatagaggtgttcatggatgatttcacta

SEQ ID NO: 19965 - DNA, 433 bp, Glycine max
  unsure (1)..(433): unsure at all n locations
ntttgaaagaatggaggagaggaagaaaatagaatagcactcgtctttgcccgctgaaattttctggacagagcatatgttgaacaaaaactcttagaaagatattgagaaattggttgttttaaattcatgccatgatcacatatttatagccatttgatggctcctgaagaagccatgttaaaagttgtgacttttggcaatttcttcaaaaccagttagttactttaaaaagttgtgacttgacaattttttcaaaaccagtcactttaaaagttgtgactcttgacaatttcttcaaaatcagtcactggtaatcgattaccataatggtgtaatcgattacacagtttattttatcaaaagttgtgactcttcatgttgaggtttgaaatccaacgctcaaaaaccattagtaatctattacaaatat

SEQ ID NO: 19966 - DNA, 449 bp, Glycine max
  unsure (1)..(449): unsure at all n locations
ggataaaatngaagctatttccttaatctcgcaggctttggtttgctctttaatttcctttcaacttacgtgctacccagttaaataaacagtatgtaactataactaatttacagtagctgctttgtttatgtaatacataacaataaaaataagcagctttgtctatgtcatatatgtaaaataaattaataataaaatttctattagtacctataacaagtgtggcgttcctcatgatttttataattatgatttgatgtatagaatttcatatatagaatggttatgaaaataatatacatggagagaaagtaattttaattgaatataattagaataaattattaaaatattagacatatatacttggtttcaaatttattttaaaaataaaataattggtatttatatacacacatgtacgtgcaccagaaacaaattaatat

SEQ ID NO: 19967 - DNA, 444 bp, Glycine max
taggagaatgaaacccgaaatgtcactaagaatcaaggtatgatgcgaaaaagcagttcaacgctggtttcttggcggtatctcgataccctgagtgggtggccaacattgtgtcggtccctaagaaggatgggaaggtatgaatatgtgtggattatcgggacctaaatcaagccagtcccaaagacaatttccctctacggaacatcgatgtcctcgtagataacacgaccaattttgctttgttctccatcatggacggtttctcaggctacaatcaaataaaaatggtactagaggatatggaaaagaccatgttcgtcaccctgtggggaacgctctgctataaggtgatgtcttttgggctaaaaaacgctggggcaacctatcaacgggctatggtggctttgttccacgacatgatgcaccgagagatcgaagtct

SEQ ID NO: 19968 - DNA, 416 bp, Glycine max
  unsure (1)..(416): unsure at all n locations
agctagattggttttgtgatagnngatttgcaggagatgttgatgatagaaaaagtactaccggatttatgttttttatgggtgattgtgtttttacatggagttctaagaagcaagccattgtgacactttctacttgtgaagccgagtatgtagctgcaacttcttgcacatgtcatgcaatttggctaagaagatngttgaaggaacttcacttgttgcanaaggaaaacacaaagatctatgttgataatagatctgcacaagagcttgccaagaatccggtgttccatgaacgaagtaagcatatagatacaaggtatcatttcattagagagtgcattgccaagaaagaagtagaattgactcatgtgaagactcaagatcaagttgtggatattntcaccaagcctctc

SEQ ID NO: 19969 - DNA, 461 bp, Glycine max
  unsure (1)..(461): unsure at all n locations
tctatagaaggttcattcctaatttctctacaattgcatcactgctcaatgagctggtgaagaaaaatgtggcatttacctgaggtgaaaaacaagagcaagcctttgctttgctcaaagaaaagcttactaaggcacctgttctagctcttcctgacttttctaaaacttttaagctagaatgtgatgcctctggagtgggagttagagttgtattgttacaaggtgggcaccctattgcttattttagtgaaaaacttcatagtgccaccctcaactaccccacctatgataaagagctttatgccttaataagagcccctcaaacttgggaacatttccttgttngcaaggaatntgtcattcatagtgatcaccaatcacttaagtacattagagggaaaagcaagttaaacaaaaggcatgcaaaatgggtagagtacctagagcaatctccatat

SEQ ID NO: 19970 - DNA, 414 bp, Glycine max
gtgaatgctctattcaatggagtggacaagaatattttcttactgatcaacacatgcacaatggccaatgatgcatgggagatcctgaaaaccactcatgaccgaaccttcaaagtgaatatgtccaaatagcaactattggccacaaaaaccgaaaatctgaatatgaaggaggaacagtgtattcatgactctcacatgaacattcttgaaaatgccaatgcttgcactgccttgggagaaaggatgacagatgaaaagctggtgagaaagatcctcatatccttgcctaagagatatgacatgaaagtcactgcaattgaggaagcccataacatttgcaacatgagagtagatgaactcattggttcccttcagacctttgagctaagactctcggatatgactgaaaag

SEQ ID NO: 19971 - DNA, 395 bp, Glycine max
agcttgaatttgaacaacggaagctctcgagaaaatcgagtggtcataaattttcacacagatgtccgattcggggaaataatatatcgagacgcacgaaattgaacaacggaagctctcgagaaatatgaatggtcataacatttcactcggatgttcgatccggggacataatttatcgagacgctcgaaattgaacaaccgaagctctcgacaaattagaatggtcgtaacttttcacgcgaatgttcgattcggggacataactcatctagacgctcgaaattgaacaacggaagctctcgagaaatttgaatggtcataagttttcacacggatgtccgattcgggaacataatatatcaagacaatcgaaattgaacaacggaagctct

SEQ ID NO: 19972 - DNA, 313 bp, Glycine max
  unsure (1)..(313): unsure at all n locations
cccatttctaccaactacaaaacctaagaaaactatattatctacacaaaaggtacacttctctatatttgcatagagggtgtttttcctaaggactgaaagaacttgtctgagatgtcctaagtgatcatctagcctcctactatacactaaaatatcatcaaaataaacaactacaaatctacctatgaaatcccttaagacatgatgcataagcctcataaaggtgctnggtgcattagtgagcccaaaaggcatcactagccattcatacaaaccaaacttggtcttgaaagcagttntccactcatca

SEQ ID NO: 19973 - DNA, 464 bp, Glycine max
agaaggtgtgtagcccaccatcttttcatagtagaatactgtttttgcgtctactattattgtcatcattgtttttctctgtcattgaggtgctacttgagctgccaagtctctccacctttgggcgtatcctttgaaagatccgtaccctctttttgcacatgttctgtagttgcatcctatccgaagacattatactgacactgcctaatgaaggcaaccactaggtccttccaagaatggactcgggaaggttccaagttagtgtaccaggtaacagctaccccagtaagactttcttggaaggaatgtatcagtaattcctcatcttttgcgcatgcccccatcttccgataatacatctttagatagtttttggggcaagtagtccccttgtacttgtcaaagtccaacaccttgaacttgggaggggtgatgatattgggttctaggaaccaactttt

SEQ ID NO: 19974 - DNA, 461 bp, Glycine max
tcttggagtcttctatgcaatgcccttgaggggtatgattatttcattccctccccccttgaaaaggatttgatctcaaatccataggttcttgaaactcatggattctttcctcaacacctctaaaaagaataaaaacatatgtattagtgatgttgggtatgttagagtacgataaggactgaaaacccctttcttggccatcttcccatgagagaatatagttcctcaccaactcagtgagtggtgctacaagtatagaaaaatatgggataaaccttttgtaaaagtttgttaagatattgaagcccctaatttcccttatacatggtggagtaagctactcaagaatgacctttattctcttatggtccatgggaagcccttgatcactatttaaaaagttaaggaaagtaatggaataaaatataccttctttctttattttcatgttgattatt

SEQ ID NO: 19975 - DNA, 426 bp, Glycine max
tcttagtttcagatgatgcagatggatttgtagctaccttatgcactcctctaatgactatggcatcatttctggcgctaaactgttgggagttggaagccatcttctcaattaaatttctggcttcagcaggagtcatgtctccaagggctccaccactggcaacatctatcatacttctctccatattactgagtccttcataaaaatattggagaagaagctattctgaaatctgatggtgggggcaactggcacatagtttcttaaatctctcccagtactcatacaggctctctccactgagttgtctaatacctgagatatccttcccgatggttgtggtcctggaagcaggaaattttttttctaagaatactctcttaaggtcatcccagctcgtgatggaccttggagcaaggtatt

SEQ ID NO: 19976 - DNA, 417 bp, Glycine max
tgcctgatactatctgagatccctttgtcgttgccttctcttcgagggtgaagcttaaggagaacccaggctcctatctggtagttcacttcgcgacgtttcccatcagcttggcttttcatagcagcttgttccttagaagcttatttcgaatagcttggaaagtgatatccctgtcagttaacatctcttcaacggcctcaatgttcgaagaccctgtaatatattctggatagttaaaggttttcggctaaaggtaacaccatacgtagtggctccagttcccacattccatgaagtattatgggatcattcgacccacgagaggagcttcccccacaagcttggccgaggatggatgaaggctcgcaaatattgttcaattatgcgattcaaaacctctgtctgtccatcaat

SEQ ID NO: 19977 - DNA, 377 bp, Glycine max
  unsure (1)..(377): unsure at all n locations
gacactctcgaacactcacgcttatagaatatgtanataagagactctgactatttcttaatcattcatgtttccatggatgaaacaaatgctatttctcccagaaaggatatttttaatgatgttgctaaatccttataacgaatgcatatccttggacactattctccagggacagggagaggaagcattgaaaatcctcccgaaaaagatcatccccttgaccacattattggtgatatctcagaaggggtaacgactaaacattctctctaagatgtatgctataatatggcttttttatctaagattgaacctctaaatataaaagaagccgtattagatgagcattggatagatgctatgcttgaacaact

SEQ ID NO: 19978 - DNA, 369 bp, Glycine max
  unsure (1)..(369): unsure at all n locations
tatagaatatataattacataactaagaccattttagattttattcatggcaccttccgatgaggctagagtgctattttctcccacaaacgatattttanatgatgttgcagaatctttacaatgaatgcatattcatggacaatattctaaagggtaagggaaaggaagcaatgaagatcctcccgaagaagatcattcccttgacaacattattggtgatatctcaaaaggggtaacaactacacattctcttaaagatttatgcactaatatggcttttttatctatgattgaacctataaatataaatgacaccatattacatgatcattggatagctgctatgcaagaagaactaaatcactt

SEQ ID NO: 19979 - DNA, 407 bp, Glycine max
cgttgctcctctcttacacctgcagatgtaatcaagtttctcataggagattttaggttgagtaaagctcgagccagtgatctcttttgggaagctgtttggcctcgtctgttagcaaaaggctggcattctgaacagcctatagatcaagttgtttctggatcaaaacaatctttggtttttcttgtacctggtgttaagaaattttcaagaaggaaactgataaaaggtgaccactactttgattctataagtgatgttttgaataaagtagcatctgaccctgagcttcttgagactgaaagtcaagcaactgagggcagtgtagatagggaaaaaacagaagacaaaggagacctagagggtgtgccaaatagggaacaagttcattaccttcaatctcaaag

SEQ ID NO: 19980 - DNA, 389 bp, Glycine max
agcttctaaactttatacaagaattaatctctgataccacttgttagacaagtggcctcagatatcttaagaaggggggggttgaattaagatatcccaaattactttccacaattaaaaatttatttcactttcttttccggttatagattcccttaacaatgaacttcttaaatattaattcaaataaaacaatttgaatatgaatgttaagcaataataaacaaaggaggttaagggaagagaaagtgcaaactcatatttatattggttcggccacacccttgtgcctacgtccagtccccaagcaatccgctagagagttctactatcttgtaaattccttttacaagttctaaacacacaaagacaatccttccttttgtgtt

SEQ ID NO: 19981 - DNA, 445 bp, Glycine max
taacaatcagtgtcatactattgatcaaaacaaagtctgtatttatatgcaatactagactcaaaatatgcaacaaacactagacctaaatcagtgtcacagaaattggaagaaaatattttatccaagcacaaacttcaagccttattccatgtattggggggaagttatggctggccatatgggtagaggtgtcatagaggagcaggtatggaggaagggaccttggactgctgaagaggacaggttgcttgttgagtatgtcaggttgcatggtgaaggtagatggaactctgttgctaggcttgcaagtaagaaacaccaaacttttttcactgttttgtttcttaatatatatgattggattttcacatttataagtgacaatatagcaaaaaaacaactgaaattgttttcaacttctactgttcatgttggctacatt

SEQ ID NO: 19982 - DNA, 405 bp, Glycine max
agcttctaaactttatacaagaattattctctgataccacttgttagacaagtggcctcagatatcttaagaaggggggggttgaattaagatatcccaaattactttccacaattaaaaatttatttcactttcttttcaagttatagattcccttaacaatgaacttcttaaatattaattcaaataaaacaatttgaatatgaatgtaaagcaataataaacaaaggaggttaagggaagagaaagtgcaaactcagatttatattggttcggccacacccttgtgcctacgtccagtccccaagcaatccgcttgagagttctactatcttgtaaattccttttacaagttctaaacacacaaagacaatccttcctttgtgtttagaattcctttacaac

SEQ ID NO: 19983 - DNA, 298 bp, Glycine max
cagagcacctgagctgcagcttgattccttgcccgaccttttttttttatgtgcacccaaacccaaggtccgggtgagaatacaacctcctttctccctttgtcggcttgtttaacatagcttttatttttcctctcaattagatctttgactctctcatgaagcttcttcacatagtccgcctttgctagaccttctttatgcttaaaaacagaaacattaggcatatgcaaaagatcaagaggagttagtgggttaaaaccataaacaacttcaaaaggagaacaattaacggtgc

SEQ ID NO: 19984 - DNA, 264 bp, Glycine max
cctttcattctgacatcattcaagaactccttagaaccccccaagaaccacagacaaaggctatgactgaaaaagctgtgaaggttgttgaagaggtcaagttcttctcatattatgctcatcacgttgccactagtgatcatgcaggtgatatcctaaagagggtctacatgattccaaaagaaagggtacacattattctcaatggtgtgggccaacacgctttcacgccagatgtttcgaaggggaaggacttcaaaaaga

SEQ ID NO: 19985 - DNA, 444 bp, Glycine max
  unsure (1)..(444): unsure at all n locations
taagctccttcaactgcacaaggctcttaatatttgatgagatccttgtggaaccttcacccgacgaagacgctgactaaaacttatattatccttctttgacaaagtatggcaggatagggacaagtaaattttcttcccatcagaccttggatgcaactgtgatcgtatacccatatcagctagatcttgacgggtattcaagccatccttcgtcttgccttgaatgttaaggagcgtcccaatcacactgtcacaaacatttttctccacatgcataacatcaatacaatgtctaacgtcaagatcacaccagtacggaagatcaaagaaaatggacctcttcttccatatgcaactctgactnttatccttcttgtgggtcttcccaaatacagtattcaggtgttgaacccgctgatatacctgctcactagtcaacga

SEQ ID NO: 19986 - DNA, 227 bp, Glycine max
  unsure (1)..(227): unsure at all n locations
agcttgtaatcgattacacacatatctgtttcgattatcagaggagattntcagaaagatattctcaattgtcacatcttttcagttggttcttgaatggctatcaaaggcctatatttatgtgacttgagacacgaatttgctaagagtttttcagaacaaaaaggtcttatcctcttaaaaaccaaaatcattttatcctcttacaaattccttggccaaaacac

SEQ ID NO: 19987 - DNA, 285 bp, Glycine max
agcttttatgcctcagatcttcttcattattggagtctttcgcttcttgaagatcagtggtagcataatagagaaggaagatagatgattggagatgccacttcaaggagaagatgattcaagaacaagctccccaccataggaagccattgattaaagcttgtatgtacgaaaagatgagtggagggagaaaaagaaaaagagcaagaaaatttttgccctaatgaggtctaaaactttgagtggaattctgaaatggataaaagtgaaaaaaaaggcccccca

SEQ ID NO: 19988 - DNA, 313 bp, Glycine max
ggaacaacacaggggagtttcaagaaatgaagagcccccggttgatgcatggacggagatgaaaaagatcatgaggaagcggcatgtgccggctactaactcacgggacttgaaattcaagctccaaaaactaacccaacgcaactatggggttgaggagtattttaaggaaatggatgtgctcatgattcaagcaaatattgaagaaaatgaggaggtaaatacggctcgattgcttaatgggttgactaacgatatctgcgatacctgcacgagcttgttgaaaaggatgatttgcttcccaaagcactcc

SEQ ID NO: 19989 - DNA, 344 bp, Glycine max
  unsure (1)..(344): unsure at all n locations
aaagcccaccctaacgcatacaacaccttatcataagtagaataattaagggtaagaccacttaacttttcactaaaataagcaattggatgaccttcttgcatcaacacagccccaatcccaacatttgaagcatcacactcaatttaaaaagattttagaaagtctggcaatgcaagtatgggggcattagctagctttagcttaagaacatagaaatcttcttctagtttatctacacatctcacaccaacatttttttagcacttcattgagaggtgctgccaatgtgctataatnctacccaaatcgcctataaaaccttgctgaaccatgaaaactcc

SEQ ID NO: 19990 - DNA, 386 bp, Glycine max
aaagttattggcgggggaatttgctcagaggttcaacattcaatttcgagcgtctcgttatattacaggactcaatcagacatccgagtaaaaagttattgtcgtttgaattggctcagagcttcaacattcaatttcgagcgtctcgatatatgacaggacgcaatcagacatccgagtaaaaagttattgtcgttggaattagctcagaggttctacattcaatttcgagcgtctcattatattacaggactcaatgagacatctgactaatacgttattgtcgtttgaattggctcagaacttctacattcaattacgagcgtctcgatatatgacatgactcaatcagacatccgagtaaaagttattgtcgtatgaattcg

SEQ ID NO: 19991 - DNA, 445 bp, Glycine max
  unsure (1)..(445): unsure at all n locations
cgtggggcatatgtactttaagtgagagagaagatatttaaatantggaataataattaatattacgagtaaataacatatacaaagatgattaatttttacataatcaatcacatattatcatataatgtaaattgattgatagtaataataaaaatataaaattcatattaattatgatttaagttctaaacattatagatgatatgataaaaaaaatgtgtataaaaatgagaaattaagcaataatgagagaaaataaaattgaataatgaaagagagaaagagtgtgaccgtcacagcttccaatagattggtgttgtcgtgcaagtacttgaggacccatgttagaacactcgctgtggtgtcatgtgcagcaaagatgacaccaatgagattatcaacaacttgagaatctgtgtgctgctgatagtacatcttgttc

SEQ ID NO: 19992 - DNA, 355 bp, Glycine max
agctttttagaatatcaatctttataagcaaagaggaaaaatctatcatgacaaaaagttgtcaaaaaggaattttcagcttggccaacaagtattgttatttaattctagattaacattgcttccaagtaagctgaagtgcaagtggtttgaccattcttcatcaaaaaagttatgccacatggagcaatgatattggaggacccaaccaccaaaaggacatggactgtgaatggcattagaatcaaacactacttaggtggagatttcgagaggctaaccactgttgtccaactgcaagaagcttgaacccaacaaggacatccatctattaagacgttaaagaagcgctcct

SEQ ID NO: 19993 - DNA, 437 bp, Glycine max
  unsure (1)..(437): unsure at all n locations
tattggagggagaatattcaatccgaatcatggtacnttttgtaacgaagaatctttttgcggcttttagatgaggacaggtacgagcctccataaagcgacacacaactcccaccgcatatagaatatcgggcctcgtattggttagataccttaaactccccacaagactcttgaagaccgtggagtctaccttctctccttcatcaaactttgataacttcaagccaccttccataggtgtgttcacgggattgcaatcaagcatattaaatttcttcaacacttcttttgtgtagcttccttgtgagacaaagatcccattctccgtttgcttcacttccattcccaagtaatatgacatgagtcccatatctgtcatatcaaattcacgagacatggactccttgaagtcttcaaacaaatttgggttattg

SEQ ID NO: 19994 - DNA, 443 bp, Glycine max
  unsure (1)..(443): unsure at all n locations
gagcatatgcaaacgacaatcacttttttacttggatgtcatantgagtctcgtaatatgtcgagacgcgtcgaaattgaagaccgatgccctgagcaaattcgaacgacaataactttttactcggatgtctgactgagtcccgtaatatatcaagacgctcgaaattgattatcgaagctctgagcaaattcaaacgacaataactttttacttggatgtctgattgagtcccgtaatatatcgagatgctcgaaatggaataccgaagctctgagcaaattcaaacgacaataattttttactcgtatgttcgattgagtcccgtaatatatcgaaacgctcgaaattgaatgtcgaaactctgagcaaattcaaacgacaacaactatttactcggatgtatgattgagtcatggaatatatcgagatgctagaaattg

SEQ ID NO: 19995 - DNA, 201 bp, Glycine max
agctttgtatttccttttagtagggaatctttccttcctaagatggagccaaacctagtccccctcattaagaactagctcatttcttcctctattgcccttagttgaatacacctttgtttggttctctatttgggtcttaaccctctcatgcaacttctttacaaactctgacctagattccccttctttatgtataaa

SEQ ID NO: 19996 - DNA, 438 bp, Glycine max
  unsure (1)..(438): unsure at all n locations
aattagggatcatagttatgaacaaggccatattgaatcntaaggatacaaccaagaggaaggcatggactattatgagacctatgcccctgttgctaggttggaagctattatattgttgcttccttttgcttgtataataaatttcaggttatatcaaatggatgtaaaagtgtttttctcaatggatatattgaagaaaagatatacgtggagcaacctctaggttttgtagacttcgatcatcctaatcatgtttacaagttgaaaaaggcactatatggattaaaacaagcacctagatcttagaattctctagttctatccagaaagagttggagatgtctatgatgagagaattgactntcttccttggacttcaagttaagaaaatcaagcatggaacctttntatgccaagcaaagtactacacataat

SEQ ID NO: 19997 - DNA, 271 bp, Glycine max
gcacaagggccaccgaaggggggtagatcctgagaaccactcatgactgaccctccaaagtgaagatgcccagattgcaactatgggccacaaaattcgaaaagctgaagatgaaggaggaaaagtgtattcatgacttccacatgaacattactgaaattgccaatgcttgcactgccttgggagaaaggatgacagatgaaatgctggtgagaaagagcctcagatcctcgcctaagagaattgacatgaaagtcactgcaatcgagga

SEQ ID NO: 19998 - DNA, 348 bp, Glycine max
agctgtctcctttttctcattttatgcataacatgcaagttcatattttaatttaacgtttactaacaagactaaaatccgtaataagatgaaaaataaattctcaatttaatacttattagtgtatatttaaaagaaagctgccaaaaattagtaattattgattatcattgggacatgtaagaaagacattatgtgtgctttttttactgagacaatgttatttgttttaatagactaataatgtaatttaacatattgaaacatcaaattataaatattctgtacaaaattaatggtatatacgtgttggatgtatctattcagcataaaaaggttcttggatgt

SEQ ID NO: 19999 - DNA, 168 bp, Glycine max
  unsure (1)..(168): unsure at all n locations
agcnttttatatatcgaggcgctcgaaattgaacaacggtaagtcttgagaaattcaaatggtcataacttttaactcggatgtccaattcatgcgcatcacatatagagacgctaaaaaatgaacaacggaagctctccagaagttaaaatggtcataagttttcac

SEQ ID NO: 20000 - DNA, 422 bp, Glycine max
cgagtttcacgccgagtttttacatcgagtttctccggtctgacgacggcgtggcggtgatgagtctggagctcacacctgcatgtaaaagtctggttgctctggctccggcgatgaacctcttcgtccatgcgagcgaatctgttctccatcgtcagtttccactccaaattctcgcgcgcgctgtccaattcttcattcacgatctcgtgtagccgctccttgcacatagtcgcaaccttggaaacgaaaacgatacaacttctctaagtctcatgccctcgacggcggacttggagaccggtggggcgccgtaacggatacgattgtactcggcgaggtgctcctcgagaccctccccgtagaagtaatacccgtgggtgactctcgggaagctgtacgttctctcgagtcccctattc

SEQ ID NO: 20001 - DNA, 416 bp, Glycine max
  unsure (1)..(416): unsure at all n locations
agcttggactttctgtgttctgggaacctctccttcctcaggtgtacccaaacccaatcacctggttcaagcacgactttctttttgcttttgttggcttgccttgcatagctcacatttttcttttcaatttgagccttcacttgctcatgcaacttcttcacatactcagctntagcctgtgcatcattatgcttaaacatagcaatgttaggcataggcaacaaatcaagaggagtcaaaggattaaatccatatactatctcaaatggtgaacaattagttgtgctatggacagctcgattataagcaaactcaacatgaggcatacaggctgtccaagatttaagattnttctntaatacagtcctaagcagtgttcctaaagtcctattgactacactcagttgaccatc

SEQ ID NO: 20002 - DNA, 371 bp, Glycine max
  unsure (1)..(371): unsure at all n locations
agcttgtcattggacaatatggactctatagcatcctgaatgtgactctctgcgtccaacagattctccttgcaatcagccaaaccctgttgaaccttaggttccaaattctggtcgtcgatcattctcttacaatcatttagaatgctgctcgcatttgacgccgcagccttcagagatatcattgccagctcctctaggtccgcgtgatcactgtctgggtccgaggaaagcacctgcatgcacaattcattgtttcccctgtttttgcatatgctcttaattagctccttgcctaatttttcttccgccgcaccgcttcngtgatgtgctagaaccaaccacatgcatatgcccatcacccacaacaa

SEQ ID NO: 20003 - DNA, 392 bp, Glycine max
  unsure (1)..(392): unsure at all n locations
atttntatatgattggctaagatnncgttaaaacataagcacttagacaatgaaggaaagctggagttgctgcacatgatgtccaacgttatgtcaaagaataagatcgggctgcacaatgcacaaggcaagataaagtgtcaaatgaagaattgaagctgcaggattcacgatgtcggatacaatgtccaggacatcctgcccgaaaatactggagttgctgaaagcattgaagttgcaagatccacgatgtctgacacgatgtcctgacatccggcccgaatatactggacatataaatctgttatatctntaacagattattgtgcagttagcaagagataagatgatctatctttaggaacgaattaagagataattatagttcgaat

SEQ ID NO: 20004 - DNA, 422 bp, Glycine max
  unsure (1)..(422): unsure at all n locations
tgtctntaagtatcaagattcaagaatcaagagaagactctatcaagataagtactaaaaaagtttttcaaaatattgagtagcacaagaatttttcacaaaatcttttaccaaagagttttactctctggtaatcgattactagaaggtagtaatcgattaccagtagccagcattgttttcaaaactgatttacaaagttgtaatcgattaccataatcatgtaatcgattaccaatgttttaaaatgttagatttcaaatttcaagagtcataactaatgataaaacattttcaaatcattttaaacttgtgtaatcgattacacaatacttgtaatcgattacccgtgtntctaaacattnntgatttcgatntaaacatgaagagcacatctttgatgtgaatcgataccatgactg

SEQ ID NO: 20005 - DNA, 410 bp, Glycine max
  unsure (1)..(410): unsure at all n locations
ctgaggganaacttgatgccttggtcaacctagtatttatcttgccttgaatcagaaatatgcacctgttgcaagagtctgtggtctatgttcttctgcagatcaccatacagatctttgtccttctttgcagcaatttggagtcaatgagcaacctgaagcttatgttgcaaacatttataatagacttcctcagcagcaaaaccaacaaccgcaaaataattatgacctttcaagcaacagatacaatctaggttggaggaatcacccaaatcttagatggacaagtcctccacaacaacatcagcctgtccctcatttncagaatgttgttggtccaagcaagccatatgttcctcctccaatgcaacagcaacaacagcagtcacaacaaagacaacaagcaaccg

SEQ ID NO: 20006 - DNA, 378 bp, Glycine max
  unsure (1)..(378): unsure at all n locations
agcttatacttatattgatgatcatagnntgagaatcatacactccatgtcccttatatgtgcaattgacttaagcataccagacatcatacacaagtatggccaacccatgccactctcacaactcattgcttcactaccaatccacccatccaagacttgctacatccatcgcttgatgcgactctttactcattccggtttcttctctcggcacgatttggtcgaaaacgaacaagaagtgatcacgtatgagctaactgatgcatctagactactcctcaaggaccacccttttagtttgaggcctttgttgctagtcacacttgatccaagtgtgattaagtcatggtgtcaattctctacttggctcacaag

SEQ ID NO: 20007 - DNA, 411 bp, Glycine max
  unsure (1)..(411): unsure at all n locations
ttcttatgtacttgagagttntatcatttcgtgacttccgaagtttggattctttgcctgattcaataggtaaattgatccatctgcgctatttagatctctctcattcaagtgtagaaacactgccaaagtcattgtgtaatttatacaatctgcaaactttgaagttgtgtggttgcatcaaactgactaagttgcctagtgacatgtgcaatcttgttaacttgcgtcatcttggtattgctgatgctcctataaaagagatgccgagaggaatgagtaaattaaatcatttacaacgtctggatctctttgttgtgggcaagcacgaacagaatgggatcaaagaattgggaggactctccaatcttcgtggtcaacttgaaattatgaacttggagattgtctccc

SEQ ID NO: 20008 - DNA, 435 bp, Glycine max
  unsure (1)..(435): unsure at all n locations
tgtatgtgttacaatgttcttaaatttctatttagtttttaagaacaacctgtctaggtaatttttttcagaaagacttttaacaaaataagaaaagaaaagtttttcataattaccttatacacaacctaatgatagaagctctttcatattagtttttttcaaaagatatttttaaattatgtataaactaacattaacttatagataagtntatttaattttttttctttctattttccttttttactagtacttctaaatacatttatccaaatagacccttaatattaatatatatcaacaatacttacatccaaatgatcacttaatcaagacttgaaattattttatataaaataaccagattaattaaccaattacgtgcttgggtttcatttctaacatcaatattagtaattatttagaacattt

SEQ ID NO: 20009 - DNA, 378 bp, Glycine max
  unsure (1)..(378): unsure at all n locations
agctngagctgggaattttgatncatggatnnctcaagaagaagatagatagtgacatgtttgtatggtctgcattgattgaatagtattcaaagtgtggacaaatgaatgatgctgtgatagtgttaacagagtatccaaaaccagacgtggtcttatggacttcaataattactgggtatgagcagaatggaaatgctgaacttgcacatgcncatttctcccgaatggatgtgtttgagctagtaagtactgatccacgaacacttgttaatgctgcttctgcttgtgacgcagtatctgattctaaccttggaagaagtgaacatggaattgtcaaacgaaagggttttatactaagtatgtttggcaattcta

SEQ ID NO: 20010 - DNA, 441 bp, Glycine max
  unsure (1)..(441): unsure at all n locations
gcctcattaaactatatatttcccgaagggtttttttttataagcctcctatttttaatggcgtgggttaccattattggaaaccccgcatgcaaatttttatagaagcaatagatctaaatatctgggaagccatagaaattcggccctacattcccactatggtggaagcaaatacaaccatagaaaaaactatgaaagaatggagtgaagatgacaagaaattagttcaatacaatntaaaagccaaaaatataattacatctgctttagggatggatgagtacattagggtatcaaattgtaaaagtgaaaaagatatgtgggataccctacacgtaacacatgaaggtacaacaaatgtaaaaagatctgggataaatacattgactcatgaatatgnaatatttagaatgaatcccaatgaaagcatatatgata

SEQ ID NO: 20011 - DNA, 414 bp, Glycine max
  unsure (1)..(414): unsure at all n locations
agcttgtgcatccaatactcctgatgaggatgtcccatatgctcttaaaactggactgatccatttgcttcgaaagtntcatggccttgcaggtgaagacccgcaaaaacatctaaaagaattccatattgtctgatccaccatgaaacccctagatgtccaggaggatcacatatttctgaaggattttcctcattctttagagggagtggcaaaggactggctatattaccttgctccaaggtccatcacgagctgggatgacctcaagagagtattcttagaataaattttccctgcttctatgaccacaaccatcagaaaagatatttcaagaattaggcaactcagtggagagagcttatatgaatactgggagagattcaagaaactatgtgccagttgccctcacca

SEQ ID NO: 20012 - DNA, 419 bp, Glycine max
  unsure (1)..(419): unsure at all n locations
acccgggatccttaagtcgcctgcagcatgcaattttggtttatanagacaccgtctcgtagtcatatgagagattttggttgtacaacatatgcattagtagatataaggactaagctggatgataaatttgtcaaatgtgtatttattggctatgctacttagtcaaaggcatacagactgtataacccactaactggcaagataattgtcaatagaaatgttgtatttgatgaagatgcaagctgggttcgggaggaatgtgaaatcagtaacagtgtttagcagaaatcagtcagttttgatggttcataagaggtctcaaatgtgccagactatgatcacactccaagccctcattcaacgccatcaagccagtgatcattagctccttcaagccatggatcatctagctcatc

SEQ ID NO: 20013 - DNA, 474 bp, Glycine max
  unsure (1)..(474): unsure at all n locations
actcaagcttatcacacaaaggtgttgctttgtgtggaggaaccattntctttggttttctctctgactttnacaataagtatgtggtcaagaaacaccacttgagtcatgacacccgttccagtggagacaataattgaggttccaagggtgttagacatcatggttgcatggtaggcaaacatctcactcatgtggttcttcaacacttgaccaatgttaggtggcattttaccacttggtatagtggcttttgtttgcaatgctactatgtgccttacttgcacaacttttagtgggaacttttcataagctgtttctctagacaacattattccgttagaaccttcttgaacaacaattactaaatatgatacctctattctggttagagtcgggtgaacaatcatgttgtctagcatatgtgatgccacaataacagtcttttccatgcttagacacaagtttattatc

SEQ ID NO: 20014 - DNA, 460 bp, Glycine max
  unsure (1)..(460): unsure at all n locations
tagtcaagctaagcactaacaatctcccnctttggttaatttgtctaaatcatacttagacacttcctgagcaggtacgagcagttatgcaagtgggatcagcaacttccattatcagagtaatcaagcacagcggaatctgtagtttagacaagttgcaaatcgtttccaggatgtcaagacatctcacatgacatctgctttctgcttctgctccccctgtctccatgcttactgcagcatcttctaacagctactagtcttttccaggatgtcgagacatctcatgtgacatcagctttttgctccccctgtcttcatgctcttactgcagcatcttctatcagctactagtagcttacatcagtcatcaacagcagcagtctccccctcaaaatcatgaatcatgcatacatcgnatcctacttctcanaatcatacatcatgcataatgctacta

SEQ ID NO: 20015 - DNA, 375 bp, Glycine max
  unsure (1)..(375): unsure at all n locations
aactcggatgtccgattcaggcgcataatatattgagacttttgatattgaataacagaagctctcgagagattcgaatggtcataacttttcacacggatgtccgattcgggcgcataatatgtcgagacgctcganattgaacaacggaagctctcgagaaattccaatggtcataacttttcactcggaggaccgattcaggcgcataatatatcgagacgctcgaaattgaacaacggaagctctcgagaaattcaaatggtcataacttttaactcagaggtccgattcaggcgcataatatatcgagacgctcgaaattgaacatcgaaagctctctagaaattcaaatggtcataacttttcacttgg

SEQ ID NO: 20016 - DNA, 370 bp, Glycine max
  unsure (1)..(370): unsure at all n locations
tgtctttaattccaagttaaatggtattatggagtaaaatatacctttcgaagttgatcaaatccattaagttgattaagcagctccattagcgttctctgaatttcacgatctgcacttgttccctcattgaaacgacgacctccaatggcatcaatctcatccataaaaatgatgcacgactaatcaagaaaagtatagatttagaacatgtntaaattagtatgtgtaaacctataggaagacaatttcgcacaagtacctcacctggtgatcacgtgcataaccaaacatctctctcattaacttggcattttctccaatgtacttgtcaattatggcactggccgaaacaacctacatcagaata

SEQ ID NO: 20017 - DNA, 421 bp, Glycine max
  unsure (1)..(421): unsure at all n locations
tattacttntagaccaaatagaaactatattctcatgtaatttatagaatgactntatngaaaagatgcttataatgtgatcgtattangataaagatgtattcangtcattggctaaaatttttatacataggttaaaatgtaattctgatttctttatttttataaatccatgattttagtttccatcttttaaaattgagatatttagtccttcaattttctaagattcttaattttggtcaattcattcatttgagatggttaattgttaattgattaacgttgatcatttatctggttttttattctcatttttttattaccgagtaaaagaattttaaaaaaaaaatatttgacgatattggtccnctgtctacctggtgagaatcccaaagctgcccaaatatanggatctatg

SEQ ID NO: 20018 - DNA, 206 bp, Glycine max
  unsure (1)..(206): unsure at all n locations
atgaattgcgttttcgttcatgtgtcctccaccctcgagttcggagctatgcgtagtgattgcttagtgcaattctccattctcaaactttttcggagccccatgaattatgtnntcgttcatgtgtcctccaccttcgagttaggagctatgcgtagtgattggcttaggcaattctccattctcaacctttttcggagcccatg

SEQ ID NO: 20019 - DNA, 429 bp, Glycine max
  unsure (1)..(429): unsure at all n locations
gccttcanagcccaccaccaacatctatgccagatanattgttaatatataagtnggaaagctgtggatttgaaagcattctggtgtaagtgatgggattagcgttcttganaactgaagactcattacccataactaatgacccagaagaaccagcttctgttgttggtaagcagtatgagacaactcctccaaatgtggcattagtttgagataccaatgagaggtaacttcttcccaaccccataaggccagagactcctccaaatagacctttgttgttcctaccgacaccaaatacaaaatcactcactgaaacacctccaagactaagtgcttcaacacctagctcaccattagtgtaagatccatcaccatagttaaccacatagttacaagttgatggattactacttccacaggctcctg

SEQ ID NO: 20020 - DNA, 431 bp, Glycine max
  unsure (1)..(431): unsure at all n locations
agcttcaacttcagaccatttcncaggtgctggaactacttcacatggacttgatggggcctatgcaagttgaaagccttggaggaaagaggtatgcctatgttgttgtggatgatttctccagatctacctgtgtcaactttatcagagagaaatcatacacctttgaagtattcaaggagttgagcctaagacttcaaagagaataagactgtgtcatcaagagaatcatgagtgaccatggcacagagtttgaagactgcacgtntactgaattctgcacatctgaaggcatcactcatgagttctctgcagccattacaccacaacagaatggcatagttgagacgacaaacatgactttgcaagaagttgctatggtcatgcttcatgccaaagaacttccctataatctctgtgctgaagccatg

SEQ ID NO: 20021 - DNA, 449 bp, Glycine max
  unsure (1)..(449): unsure at all n locations
ntacacattgtgttgngtattattgattcctacgattgttaattattacttcnatncnnaccttaaattattactttcacgaattntgattatatttctgagaaaattttcctagaaatgttattattaaaatattatttgaatattattctcataaaaaatgtttggtaaatatttttaagtttattttaatttaaaaaaaatattaaatagataaataaatgagatagaataagaggaaagtggaaaattattttaaataatttcatgtgaatataagatttccacccttatacatgagaataagaaaagatggaaaaatatatgtacaatggatntgtgagaatgaattaaccaataactttcttgttatntcaattttatttaaattatcttacattctacaagatattttcaaaaataacatttctaatcaataaatttctaac

SEQ ID NO: 20022 - DNA, 412 bp, Glycine max
  unsure (1)..(412): unsure at all n locations
tgtagggttaaagtctcacgattggcacgttctcatgcaacatttgtnagncgaggctatacgagacatcttgccaaacaaagtcaggttagcgataactcgcatgtgctttttcttccatgctatatgtagcaaagtcattgatccagtcaagtttgatgagttggaaaataaggccccaattatactgtaccagttggagatgtattttccctgctttctttgacatcatgattcacttgattgcgcatctggtcagagaaatcaaatgatgtggtcctgtttatctacggtggatgtacccggttgagtgatacatgaagatcttaacagggtatacaaagaatctatatcgtccagtcgcatctattgttgagaggtacattgcaaaggaaagccattgattttgttc

SEQ ID NO: 20023 - DNA, 352 bp, Glycine max
  unsure (1)..(352): unsure at all n locations
actcaagctttgcatggtgtctgaaatgtaatgatgtcattattncctttggatttaatgttaatatcgcagatgggcgtacatatctaaagatcagtgggagtaaggttatttttctaattctgtaagtcggtgatatcttgtntacaactaatgatcttggtcttcttcatgaggcaataagtatttctctagacactgtgaaatgaaagatatgggtgagacaagctatgtgataaggatagaaatattctgaaataaatcataaggattgttaagcttgtcttagagaacatatatcaataaagtactagagagatttaggatggaagagtgctcatcatcacccgtt

SEQ ID NO: 20024 - DNA, 434 bp, Glycine max
  unsure (1)..(434): unsure at all n locations
agcttaagcttcttcaattgcacaaggctcttaatatttaaagagtatccttgtggaaccttaacccaacgaagacactgacaaaaacttatgttctcctttntggacaaagtatgataagctgggggcaagtaaatnttcttcccatcagaccttggatgcaattgtgatcgtatccccatctcagctagatcttgacgggtattcaacccatccttcgtcttgccttgaatgttaaggagcatcccaatcacactgtcacatacatttttctccacatgcataacatcaatacaatgtctaacgtctagatcagaccagtacggaagatcatagaanatggacctcttcttccatatgcaagtcttactgttatcccttctttgggtctttccaaatatagtattcaggtgctgaacccgtattatacctgc

SEQ ID NO: 20025 - DNA, 444 bp, Glycine max
  unsure (1)..(444): unsure at all n locations
ctatcaaccgctgcttaactccttaactgcacaagctctgaaatatttatattttcttgaggaaccttcacctgacgaagacactgacaaaaacttatcttctccttcttggacaaagtatggcaggctgggggcaagtaaattttcttcccatcagaccttggatgcaactgtgctcttatacccatatcagctagatcttgacgggtattcaagccatccttcgtcttgccttgaatgttaaggagcgtcccaataacactgtcacaaacattnttctccacatgcataacatcaatacaatgtctaacgtcaagatcacaccagtacggaagatcanagaaaatggacctcttctttcatatgcaactctgacttttatactttctttgggtcttccaaatacagtgttcatgtgttgaacccgtgatatacctgctcacc

SEQ ID NO: 20026 - DNA, 377 bp, Glycine max
  unsure (1)..(377): unsure at all n locations
agctnngnttcagatattcttcgngganngctgcatnctcgtcccttgtcgcatgattgccaaaatccaataactctgccactggattatgtgcttcttttggacaatttgtggaccaaacaaccgtgttgttgtgtgtcatgaccaaattgccagaactgtacagtctcaagatggcagaggaatcatttattgggttgccaccgtttgcaacccatacaacatgttgtgacngattattcttgaaccaaatccccaggtaacttttgtttggaagtccaagattgaagaaaccaagctcaaagattccccttgtggaaaccatggtctttccaaaacttgaggattgggactgtgatatggatgatgtgttgtct

SEQ ID NO: 20027 - DNA, 398 bp, Glycine max
gacctatagatactcaagcttgtgcgcatttgcgatagtgatgttgccggagatgtttatgttatattatgtaccaccggattcgtattccttatgggtgatagtgtttttacatggagttctaagaagcaaggcattgtgacactttctacttgtgaagccgagtatgtagctgcaacttcttgcacatgtcatgccatttggctaacaagattgttggaggaacttcacttgttgcataacgaaagcacacagatctatgtagataatagatctgcacaagagcttgccaagaatccggtgttccatgcacgatgtatgcatatagatacaaggtatcatttcattagagagtgcattaccgataaagaactataattgactcatgtgacaactca

SEQ ID NO: 20028 - DNA, 423 bp, Glycine max
  unsure (1)..(423): unsure at all n locations
taagctccttcaactgcacaaggctcttaatattttattagtatccttgtggaaccttcacccgacgaagacactgacaaaaacttatcttctcctttttggacaaagtatggcaggctgggggcaagtaaattttcttcccatcagaccttggatgcaattgtgatcgtgtgcccatatcagctagatcttgacgggtattcaagccgtccttcgtcttgccttaaatgttaaggagcgttccaatcacactgtcacaaacattnttctccacatgcataacatcaatacaatgtctaacgtcaagatcagaccagtacggaagatcaaagaaaatgaacctcttcttccatatgcaactcttacttttatccttcttttgaggtcttccaaatacagtattcaagtgtaaacccgctcata

SEQ ID NO: 20029 - DNA, 418 bp, Glycine max
  unsure (1)..(418): unsure at all n locations
tgcttcttatttgatccagtagaggaggagcatacaacctatttcactcaagtcacacccaggaactctggcacaagagacttggtcattgccatcttgaaagaatgctaaacatgaaaaaaaggaaatatgcaaaagaaaatttgaagaagtttcaaatggaggaatacaaatctgttagcacaccaatgaatcaaaatgacaagtttagcaaggaagaaggtgttgataacattgatgaaggatattataggagcttgattggatgtctaatgtatctcactacaacaaggccaaacattctatttgctcaaaagaacaaaactggaattnttgttgacaatcaagtagccattgctattgcaaacaattccatgtgtcatgggaagactaaacatttcaacatcaagttctatta

SEQ ID NO: 20030 - DNA, 226 bp, Glycine max
  unsure (1)..(226): unsure at all n locations
tcgatatattacgcgactcaatcagacatcagagtaaaaagttattgtcgtttgaatntgcaacgaccatcaacattcaatttcgagcgtgtcgatatattacgcgactcaatcagacatcagagtaaaaagttattgtcgtttgaatttgcaacgaccatcaacattcaatttcgagcgtctcgatatatgtcgcgactcaatcagacatccgagttaaaagtta

SEQ ID NO: 20031 - DNA, 355 bp, Glycine max
  unsure (1)..(355): unsure at all n locations
agctntagttttacccttgcagaattatctaagagctgcttagattgtggcctcaaccagtcaatgaacatattcagctgtatgggctcagagaatccatgagtaggaagttttcgcagcaagctacaaaatctttctagggctttactcanagatntatctgggaactggtgaaaggaagagatgacagcctttccctctgcagtcttggactctgaganatatttcttcagaaacttttccacaacttcatcccaagtcctcaagctattacctttgaatgaatgtagccacctcttggcttctccagatagtgaaaatgaaaataagttgatcctaacaacatcttctggca

SEQ ID NO: 20032 - DNA, 351 bp, Glycine max
  unsure (1)..(351): unsure at all n locations
gcattccctatatgttctagaatncagttagtagttttcttaaagcattacacactatatattgcgtacaacaaatatgcaatttgatccaacgtgtataccatcttggatggtaaaagtaggtaccttctggaggttggacaagcttccggttatgaggagcggccatttccttcttcaactgtgtcagtatgtcctccatggtgtactctctttgccaatttgcaagaagaccaaatttctttggttcaacctatttcattcaagtctataaatcttgtcacaaagataattagttattaagccaataaaatagactaaattgtctcataatcatacacatgagaagtg

SEQ ID NO: 20033 - DNA, 455 bp, Glycine max
  unsure (1)..(455): unsure at all n locations
tctgaggaggtgtctcaggactgcgcggcttatcgctgtagttgtgctttccaaggttgtgctttcggcatggttgatgtttgagaggagggaggatgagcttgagggtgtgtcttctatggattgtggtggttgtgttcttgaatgtccgaaggtgaatttggtgaagggctctagtccttgttcaatcaatgataggtgccagtgtccacaagggactaaagaggaaactagcaatgaagaaagtgtgtttttgtgtttgccagatgaggaacaaaaggatgtttctttctgcattgcgagtgaggaaattgattgtgttaagtggagaattgctgccctttctgacccttttaaggcaatgctttatggtggctntgctgactccaagatgaggaagattgatntcagcanaaatggtataagctcacagggtatgacggcagtggagttgt

SEQ ID NO: 20034 - DNA, 398 bp, Glycine max
  unsure (1)..(398): unsure at all n locations
ctcagctggacaaggaaggaaatttntctaccatctactatgttactatgtttaaatgagcacagatgattatgctaccacaganaaagaaatgttggcaattgtctatgcacttgaaaagtttaaatcttatttggtaggctcaagagttatcatctacactgatcatgcagctattaaatacttgctcaacaaggctaattccaaaccaagattgataagatggatnnttttgttgcaagaatttgatttggtgattcgcgataaaaagggatcagagaatgttgtagctgatcatctgtcaagattagtgaatgaggaagttacagcanaagaagttgaagtgagagatcaattccctgatgaatcacntattttaataagtgaaagaccctggt

SEQ ID NO: 20035 - DNA, 370 bp, Glycine max
  unsure (1)..(370): unsure at all n locations
agctnggatctcatntctcatnccttatcaacnncncanngctatgagtcagtgtagttaggggtagtgccaatttagaaaatccctcattgaatttgctataatagccagccaaccccaagaaactttgaacttctgttggagttgtcggttgttgccactccttaaccgactccactttaattggatccacagcaaccccatctttagaaatcacgtgccctaagaactgcactttctctaaccaaaattcacatttcgacaatttggcgaacaatttcctatccctcangatatgcaacacatttctcaagtgcttgtcatgctcctncttattccttgaatacactatgatatcatcaatgaacac

SEQ ID NO: 20036 - DNA, 388 bp, Glycine max
  unsure (1)..(388): unsure at all n locations
catccaataccctgatgaggatgtcccatatgttcttattattattattggtccattngcttccaaagtgtcatggccttgcangtgaagacccgcacaaacatctaanagaattccatattgtctgctccaccatganaccaccagatgtccaggaggatcacatatttctgaaggcctttccttattctttagagggagtggcaaaagactggctatattaccttgctccaaggtccatcacgagcttggatgacctcaagagagtattattagaaaaaattttccctacttccaggaccacagccatcagaaaggatatttcatgcattatgcaactaagtggagagagcctatatgaatactgngagaatatttaaaaactatg

SEQ ID NO: 20037 - DNA, 393 bp, Glycine max
  unsure (1)..(393): unsure at all n locations
gctggctattataganagttcattgaagggattttctatattggcattgcccctaactaagtggactcgtaagaatgagaagttcttctggaatgagaagtgtgatcaaagtttccaagagttgaagaggcggttgacgacagctccagtgttaattttgcccgaccctaagagaacattcgaagtgtattgcgatgcaagcgggcaaggcttggggtgtgtgttgatgcaagagggaagagtagtggcttatgcttcgcgtcaattacgtcctcatgaatntaactatccgactcatgacttggaactagcagcggtggtctttgccttaaagatttggaggcattatttgtacggtacttcgtttgaagtttcagtgatcacaagagtctc

SEQ ID NO: 20038 - DNA, 426 bp, Glycine max
  unsure (1)..(426): unsure at all n locations
agtcgntgcaacatgatcatacattcatggattgngatttattatcacactcaatcggccagagcatagtgtttttgganaatgtcgctgatgttcggaatgatttgaacgagagattctctcaaggagaccttatcagaatttctgaacttcaacaagagatatatggcctcaggcaaggttccttctctgtcactgaattttattctgagttaaaaatactttgggaagaactttaaacatatatgcgtattccatgttgttcctgtaccattaaatgcacctgtgctgcaatgagaaatgccagacattntcatactcttaattatgctataagaattttgactggttngaatgacaatttttcagtagtgaaatctcagatcctnactatggatccactgcctagtatgaacacaatttttc

SEQ ID NO: 20039 - DNA, 429 bp, Glycine max
  unsure (1)..(429): unsure at all n locations
agcttaaatttgcggttgtatgacttanagtactaacagagcattttagaggggtnntacttntnnntgtttgaaaaacttacataattagcataaatatttttgaaacaatttttaattaaaaaaaccgtctttcataaaacacacaaacagtaggcactaaaaccttcccaaatgctaagacaacaaaggctacattacaaacaaggtccagtctagagcaacacattcacttgaagcaagttccaaagtacctcattagaacagaagcagcgataaacatgaccggattggtgtaggttctccgcatattgtttgtataaagaattcctctcagactgcctataatgaccataatcccctccaacaccangccctaacanattcatcacaacccacaaaaatacacacttaaccataaacaaaaat

SEQ ID NO: 20040 - DNA, 343 bp, Glycine max
  unsure (1)..(343): unsure at all n locations
agcttaaactttcatttctagcgtttcgnnatataacggggactcaatcatacatccgagtaaaaagttatcgtcgtatgaattggcttaaagcttaaacattcaaatttgagcgtctcgttatattacaggactcaatcagacatccgagtaaaaagttattgttctttgaattggctcagaggttcaacattcaattttgagcgtctcgatatattacgggactcaatcagacatccgagtaaaaagttattgtcgtttgaattggctcagagcttcaacattcaatttcgagcgtctcaatatattacgggactcaatcagacatccgagtaaaaagtta

SEQ ID NO: 20041 - DNA, 436 bp, Glycine max
  unsure (1)..(436): unsure at all n locations
agatactcagcttgagccattctaanataataacttntactcggatgtctttattgattcccgtaatatatcgacacgctcgaaattgaatgttgaagctctgagccaattcanacaacaataactttttactcggatgtccgattcagtgacgtaatatatcgggacgctcaaaattgaatgttgaacctctgagccaattcaaacgacaataactntttactcggatgtctgattgagtcccgtaatatatcgagacgctcgaaattgaatgtggaacctctgagccaattcaaacggcaataactttttactcggatgtctgattgagtcccgtaatatatcgagacgctcaaagttgaatgttgaagctctaagccaattcatacgacaataactttttactcggatgtctgattgagtcccgaatataacg

SEQ ID NO: 20042 - DNA, 273 bp, Glycine max
  unsure (1)..(273): unsure at all n locations
acatctatcctgtgtttcagatattngaacgggctatccgcaacaaataaatacgtaacaagtcaattcaagaaattgggagaagagatcctgtctcaatttaactagttcatgtcaatttgattgctaaccttcattgaagttaacttgttcaatgcttccagctacaccataaccctggattacattcacatcttttacaaactgaggtgagagctttggaagcaaatttctggagtctacaatcacagccttgaacatgcgtgatggggc

SEQ ID NO: 20043 - DNA, 451 bp, Glycine max
  unsure (1)..(451): unsure at all n locations
tgaagatgttgtgctcanagtctctggatgatacncttcntttagactttggagtaaaccttggttctaagatgtggcaacataagtgttatcaatctaacaaaaaatcctatcatgcattctacgactaaacacatagaaataatgcatcattttcttagagatcatgtgttaaaaggtgactgctacattgagttcatagatagtgagcattaacttgcagacattttcactanaccacttgctagagataggttctttntcattacaaatgatataggcatattagatgcatccaacataaaataacttcctatttgcataatgtgtgatgcacatngctatttgagacgatgactaatttattctggagtctctactttaatcaatcaccaagtagtttaatcgattacttctctctcgctaaagtgtcagaagtaacaagacactt

SEQ ID NO: 20044 - DNA, 327 bp, Glycine max
tttcttcacttatgtttgtatggctagaaacaagcacctaggcagtggtacaagaagtttaatgagtttatgagcaactcaagattcaaaagatgtgacatgggccattgctgctatgttaaaaaatatactaatagttatgttatccttgttgcgtatgtcgatgacatgttgattgcaggatctattatgatagaaattaatatgttgaatcagcagttggcagaaaactttgaaatgaaggatcttgctcccgctaaacaaaatcttggtatgagaattcttacatacagatcataatggaattttgagctgtctgaagagaaa

SEQ ID NO: 20045 - DNA, 449 bp, Glycine max
  unsure (1)..(449): unsure at all n locations
agcttcaagattcaatntctagcgtctcgatatgttacgggactcaatcagacatccgagaaaaaagttattgtcatttgaatntgctcagaggttcaacattcaatttcgagcgtctcgatatgttacgggactcaatcagacatccgagtaaaaagttatggtcgtttgtattggctcacagcttcaacattcaatttcgagcgtctcgatatgttacgggactcaatcagacatccgagtaaaaagttatggtcgtttgtattggctcagagctgcaactttcaatttcaagcgtctcgatatgttacgggactcaatcagacatccgagaaaaaattattgtcgtttgattggctcagagcttcacattcaatttcgtgcgtctcgatatgttacgggactcaatcagacatccgagattaaaagtattgtcgtttgaactgctc

SEQ ID NO: 20046 - DNA, 157 bp, Glycine max
ttcttccttattatgagcacctaacggactactgggagaaagtatgaccatctgaatctctcgagagcttccattgatcaattttaagcttctaaatatattatgcacctgaatgatacttgagactgaaaagttatgacccttggaatttctcgag

SEQ ID NO: 20047 - DNA, 351 bp, Glycine max
  unsure (1)..(351): unsure at all n locations
tagctngtatcttatgcaaacggcaataacgttgtactcggatgttcgattgagtcacgtaatacatcgaaacgctcgaaattgagaacagaagctctgtgcatattcaaacgacaatacattttaactcggatgtccgattgagtcccgtaatatatcaagacactcgaaattgagaataatagctctgaacaaattcgaacgacaataactttttactcggatgtccgagtgagtccagtaatatatctagacactcgaaattgagaatagaagagctgagcaaattcaaacgactataactttgtactcggatgttcgatggagtcccgagcgtctcgatatattatg

SEQ ID NO: 20048 - DNA, 380 bp, Glycine max
  unsure (1)..(380): unsure at all n locations
agcttccattatgagctctagtttcttggtcctccaccaaggaaccagtagtaacattgtcatcctatgaagctgagtatattgcagcctcagaagctgcatgccaagcagtgtggctagatgccccgatgaagaaattgcaactgganaaatcatgtaaagtgaagttgttggtagacaataaatcttccattgatttagctaggcatccgacttctcatggaagaagtaaacacatagaaacaaagttccacttcctaagaatgtcagcaatgagaaactgaagattgacattgcagaactgaaattcagcttgaaacatactcactaagactttgaagctagaaatgtntagatgtttaagagattccattggaatt

SEQ ID NO: 20049 - DNA, 438 bp, Glycine max
  unsure (1)..(438): unsure at all n locations
agcttgaatgtgcgtaccccaccattttttcatagaaaaacactggtaatgtgtctactattactatgatcatctctttctccgtcattaagggtgccatatgggctgccaggtctctccacctttgggcatattctttgaaagattcatgccccctcttgcatatgctctgtagttgcatcctatccggagccatatcagaattgtaccgatactgcctaacgaaggcacccattaggtccttccaagaatggactcangaaggttccaagttagtataccangtgacaactgccccagtaagactttcttgggagaaatgtatcagcagtgtctcatcttttgcgtatagcccccatcttctgacaatacatctttagatggttcttggagcaagtagtccccttgtacttgtcaaatttcagcaccttgaacttg

SEQ ID NO: 20050 - DNA, 404 bp, Glycine max
  unsure (1)..(404): unsure at all n locations
agcttgcatatcanagatttgttggaggaatcaaatcctggaggctgctgcatgtacacttcttcttgtagaatgccatggagaaagacattgttcacatccagctgctgtatgggccagtgataggtgacagccaaagtgagaagaagtctaacagtaataggcttaataactggtgaataagtctcttgaaatctgtgtcatattgcttgagggcaaagttgattgaggcttgtgattanatgaagaggaagagggaaagaggtcatacggaaatctggactcattgaacaccacatccttagatatgtagattctgccttagaagaaagacattagtagcctttgtgcgtangagaatatcccagaaaatgcattcttgagactgaattgngagttattct

SEQ ID NO: 20051 - DNA, 334 bp, Glycine max
  unsure (1)..(334): unsure at all n locations
tagcaatattgaagccgttgtataggtttgctgccagcgctgtcctcatcagaccattcaatgcctcagctactatattgaataaaaatggagctagagggtccccttgtctaagacccctttgaggcttgaactcctttgtggggctaccgttgactaaaactganattgaggctgatttcagacacccttccatccagctgatccatttaggacaaaatcctgttcttttcagcatataccagaaacaaattcatgataccgagtcataagccctttcataatcaactttgaatatgaggcagggttatggctcctcttagcttcatcaatg

SEQ ID NO: 20052 - DNA, 242 bp, Glycine max
  unsure (1)..(242): unsure at all n locations
attcctgataattcggattctgagactgtcctcaaactatctacaaattctctgcatgggacctgagaggttgtctaatanaagttgctgctctgaactacctttcatattgacaggcagaaagaattccaatatgtaatcatcatcattagtataagtactccttagcctaattgcaactgcagcattcaaattatactttgcgtgcatgatggacaagtgggtattcactaatatcatat

SEQ ID NO: 20053 - DNA, 376 bp, Glycine max
  unsure (1)..(376): unsure at all n locations
ctggatgcattggttaactaggtaacccagctgttcttgaaccanaaatctgtacctgtcgcaagggtctgtagtttgtgctcctctgctgaccaccatacagacctttgcccttccatgcaacaacctggagcaattgagcagcccgaagcttatgctgcaaatatttacaatagacctcctcaacctcagcagcaaaatcaaccacagcagaacaattatgacctctccagcaacagatacaaccctggatggaggaatcaccctaatctcagatggtctagccctcagcaacaacaatagcagcctgctcctttctatccaaatgttgttggcccaagcagaccgtacattcctccaccantccaacaacagc

SEQ ID NO: 20054 - DNA, 191 bp, Glycine max
actcggatgtccgattcatgcgcatgagatatcgattctcttgtatttgaataacacaagctctcgagagattggaatggtcataactcttcacaccgatgtccgaatcgggcgcataatatgtctagacgctctaaattgatcaacggaagctctcgataaattataatgggcataacttttcactcgga

SEQ ID NO: 20055 - DNA, 206 bp, Glycine max
tgatgacagctttccatcatctgctatacagtgattagatgaacgccaccatacttgctctgcactgttcataatgggatccatccagaacaggaggtctgttcactgtgcctccttctttctccatgtgcatcagaaccaacctacctagatctcactcagtgatttcgagcgaccgctctgataccaagtgaaattctgatact

SEQ ID NO: 20056 - DNA, 410 bp, Glycine max
  unsure (1)..(410): unsure at all n locations
cgacaataactatgtactcggatgtctgattgagtcccgaaatatatcgagacgctcgagatggaataccgaagctctgagcaaattcaaacgacaataactntntactcggatgtctgattgagtcccgtaatatatcgaaaagctcgaatgtgaatgtagaagctctgagcaaattcaaacgacaataactttttactcggatgtctgattgagtcccgtaatatatcgagacgctcgaaatggaataccgaagctctgagcaaattcanactacaataactttttactcggatgtccgattgagtcccgtaatatattcgagacgctcgaaattgaatgtcgaagctctgagcaaattctaacgacaataacttnttactcggatgtctgattgagtcccgaatata

SEQ ID NO: 20057 - DNA, 251 bp, Glycine max
tgcaacacttatatgacgtggtcgcagcttttctcttctatagaataattatgaccttggcggcagtagatacaatccaggttggaggaatcatccaaatctgagatagacaagtcctccacaacaacatcagcctgtccctcctttccaaaatgctactggtccaagcaagccatatgttcctcctccaatgcaacaacaacagtagcagtcacaacatagacaacaagcaactgaggctcctcctcaac

SEQ ID NO: 20058 - DNA, 282 bp, Glycine max
  unsure (1)..(282): unsure at all n locations
tctagtaggaattatggtggttgagtggcaccaaactcatgatgacttttgcatatcatccgcaatcggatggccaaactaaagttgctaatcatattgttgatcagtacttaggtgcttttgtccatataagaccatcagcttgngggtgtttcctattatgggaagaatggtcctacaatacatccctctattcagctacaagaatatctccattcgaaatcaccttcagcaggaagccacctaattttcctcagtatatagtatgtacctctaaaattg

SEQ ID NO: 20059 - DNA, 392 bp, Glycine max
gcccaacgctgtgttcatactctgccagaacctattatgttaatttatgatctctatcagacactatgctagatggcacaccatgtaatctgacaatctcactaatgcacagggaggtcaacttctctaaggaaagcctaatattgatggggataaagtgtgcgaatttggtcaatctttcaacaaacacccaaatagaatcaaaacctttgtggtcctgggtagtcctacaacgaaatccatggagatactatcccacttccacttgggtatctctaaaggttgtaacttacttgaaggtttgtgatattctatcttagccttttggtagactagacacgcatacacaaacttgctacctctctcttatgttgggccccaaaacattacct

SEQ ID NO: 20060 - DNA, 278 bp, Glycine max
  unsure (1)..(278): unsure at all n locations
ccgagtaaaagttatagtcgtgggaatttgctcagagcttcaacattcaatttcgagcatctcgctatattacgggactcaatcagacatccgagtaaaaagtttgttgtttgaattggctgagagcctcaacattcaatttcgagcgtctcgatatattaagggactcaatcagacatccgagtaaaaagttattgtcgtttgaatttgctcagagcatcgacattgaattgcgagcgtctcgatatattacnggactcaatcagacatccgagtaa

SEQ ID NO: 20061 - DNA, 362 bp, Glycine max
  unsure (1)..(362): unsure at all n locations
gaggtccagagactctacaagatgtgcagccttttttgatttaaccttttgctgacccagtaatacactagctntaactcgctattcatttgagctaattgtcttcatcatgtttcctttaggttgagataacctaaaccttttgatttcatattattttatggttatgcaggatattatacgactgccaatgctatttatctntcttcataagccattggcccaatttcgatctgttttaaaagccctaagagcacaaaggcttgcttcaatcggtggtggatctctttagaatataactgaacacatgcactgcctctccaaaacttatttgcatacatcactacagacatatatttcac

SEQ ID NO: 20062 - DNA, 351 bp, Glycine max
gatgcacacacctgtgagcaagcgacgaagccttttatcttctaacctgtgcgaacgaagagcgggagagctccacaaacacggcgagctaccaagagacctccatgtcttacaaggtgacgacaagctagctcgatctcgataactcagacatgacaatagctgaattactgtatcatcaggcaaacacttccaatcaacaaccccttgcctttgagttgccaaatccaaaacctcatcttgaacttcagggagactagactgcaccacattccctatgctatgtctcgccagctttcgtctcactctatgatccatgtctcaacaaaatcacagcatacccacaccaac

SEQ ID NO: 20063 - DNA, 173 bp, Glycine max
  unsure (1)..(173): unsure at all n locations
tggtcctaacttttaactcgtaggtctgattgaggcggataatatatcgacacgctccatattgaacaatggaagctcttgagcaattcanatggtcataaatagtcactcggaggtccgattcaggcgcataatttatcgagacgctcgaaattgaacaacggaagctctca

SEQ ID NO: 20064 - DNA, 262 bp, Glycine max
  unsure (1)..(262): unsure at all n locations
actatgcagagaatatccaagagaaataccttcttcagatttatcatcaaattntcctaagtgatgtttggcattattcaatacaaaacatttacaaccaaagatataaagatgtgagatgtttggttttttgccattgaacaattcatatggagctttctttataatgggtcctattaaagccctatttaaatgtaacatgcagtggtaacagcttcaaccctggcataccctaatttcgtccggggacctttgcttgatg

SEQ ID NO: 20065 - DNA, 320 bp, Glycine max
ccaagtaaaaattaatggcgggtgggattggctcaaagattcaacattcaatttcgagcgtctccatatattacgggactcattcagacatccgagtaaaaagttattgtagtttgaattagcttagagcttcaacaatcaatttcgagtgtctcgttatatcacgagactcaatcagacatccgagtaaaaagttattgtcgtttgaattggctcagagcttccacattcaatttcgagcgtgtcgatatattacgggcgtcaatcagacatccgagtaaaaagttattgtcgtttgaattcgctcagagcttcaacat

SEQ ID NO: 20066 - DNA, 300 bp, Glycine max
tcatccaaccttatatggtcgaatccttcacaacagcagcagcaacaataacaaccttatcttcaaaatgttgttggtccagcacacattacgttcctccactaatccaccaacaacaacagcaacagcccccgaaacaacaaactatagatgctcctccacaaccttcccttgaagaacttgtgaggcaaatgactatgacaaacatgcagcttcacaacagaccatagctgccattcagagcttgactaaattagatgggacaattggctacacacttaaatcaacagctggaccaaa

SEQ ID NO: 20067 - DNA, 371 bp, Glycine max
agcttattattgtagatgttgatcatgctaagcttggagacgaaatcatgaaatttgggtggtgccaatgctttggtgagaaaatctgccacttgatcacttgttgaaactggtagtagctttagagtgcccttcaaaagcttctctcgcacaagatggcaatcaatttccaagtgttttgtgcgttcgtgataaaccggatttgaggcaatgtggactgcgctttggttgtcacagtaaagagttggagttctggtaagctgaactctcaaatctgcagaaagatacaacagccattgcaactcacaagcagctgaaaacagagccctgtactctgcttctgaagatgatctggacacagttgcttgctt

SEQ ID NO: 20068 - DNA, 314 bp, Glycine max
tcattgatcgtctcgatatatacggttctattttacatctgaggaaaaaagctatggtggtttgaatttgctgagagctccaacattcaattttgagcgtctcgatgtattactggacttaatcagacatccgagttaatagttattgctgtttgaatttgctgagagcttcagcattcaatttcgagcgtctcgatattttacgggactcaatcaaacatccgagcttaaagttattgttgttggaatttgctgagagcttcaacattcaatttcgagcgtctcgatattttacgggactcaatcatacatcc

SEQ ID NO: 20069 - DNA, 384 bp, Glycine max
actatcgctccagtgctagtgtttcctatcccgagaaaaccctttgaggtgtattgtgatggatcaaagatgggtttaggaggagtattgatgcaaaatggccaagtagtggcctatgcttctagacaactcaagactcatgagaggaattatcccacccatgatctggagttggctgctgtagttttttccctttagatgtggaggcattacctgtttggctctaagtttgaggtgtttagtgatcataagatccttaagtactcgtttagtctgaaaaagttgaacatgcatcaaaggagatggttaaagtttcttaaagattatgattttgagcttagctaccatctcaacaaagccaatgtagtggctgacgccttgagt

SEQ ID NO: 20070 - DNA, 293 bp, Glycine max
gggggggggttgaattaagatatccccaactgtttcccctaattaaaaatctattccactttttactcaagttatgaatccccttaatgacaatcttcttaaatattaattcgagcaaagcaacttgattatgaatataaagcaataatatataaaggagattaagggaagagaaaatgcaaactcagttttatactggttcggccacacccttgtgcctacgttcagtccccaagcaatccgcttgagagttccactatcttggtaattccttttacaaggtcttaacacac

SEQ ID NO: 20071 - DNA, 299 bp, Glycine max
agcttcttatttgtgcttggtgcattagcgagcccaagaggcatgactagccattcatacaaaccaaacttggtcttgaaagcggttttgcactcatcaccctccttcattctgattaggtgataaccacttttaagattaattattgaaaagatgttggcaccatgcaactcatcatgtaaatcatcaagtctatgaatgtggcgcctatactttacagaaatgttgtagatggccctgcaatctgtacacattctcacgtaccatcctttgtgggcaccaacaacactggcacaaca

SEQ ID NO: 20072 - DNA, 401 bp, Glycine max
  unsure (1)..(401): unsure at all n locations
caaacattaaaagggagaaggtaatattgtagccgatgctctttctcggcttcatgcattactttctatgcttgaaacaaaattgattggtcttgaatgtttgaaaagcatgtatgaaaatgatgaaacttttagagaaatttttaaaaattgtgaaaaattttcagaaaatggtttctttagacatgaaggctttcttttcaaagaaaacaaattgtgtgtgcctaaatgttctactagaaattttcttgtttgtgaagcacatgaaggaggtttaatggggcattttgggatccaaaagactctagaaacattacaagaacatttttattggcctcatatganaaaggatgtccacaaattttgtgaacattgcattgtatgtaaaaaggcaaagtcta

SEQ ID NO: 20073 - DNA, 372 bp, Glycine max
  unsure (1)..(372): unsure at all n locations
agctcangttttgaatatgatggcanaccttcataattgttgttcaacacatacaagctcacttgtaaaaaatcttctacacttggagtgataacatgcagtcctcttgaacccttactgcccactctgtcgtcatggcgagactcaagaaggccaacaggtntagccttttcaatgtactctanacaaaattcaatggcttcttctgcaatgtacctttcaacaatagatgcttctggacaatgtagattcttggtatacccttttaagatcttcatgtatcgctcaaccgagtacatccaccataaataaacaggaccacaacatttgatttctctgactagatgaacaattaagtgaatcatgatgtca

SEQ ID NO: 20074 - DNA, 438 bp, Glycine max
  unsure (1)..(438): unsure at all n locations
gagaatggacttcagaagtgtttcanaagttacaaactacttcaaggaaaacatgaaggaggtatagataattctttaaaaatttccattcaatcatgtgatgactttgaaagtctaaaattaaagacaacaaagctttgtcttgaaaatgaggatatttgtaaataaagatatagtatattggaagaccttcagaagttgaaaaatcaactggaaggcttacaaaatgagtatatcacactcaataaacttcatgattgcctaaatgaggaaagatgtaatctattgaaagcatgttcccaagtccataagaattatgaaaacttggaggcaagtaaacatatgatgtagctccaagtagagcttgtaagccttggatctttttcatcaatggagtattttgcttcttgaagagatcaatggcagtggaatgaaaaa

SEQ ID NO: 20075 - DNA, 314 bp, Glycine max
  unsure (1)..(314): unsure at all n locations
ataaaaggaacctaattgaagccaccagtaagaaccataacccgcttccctccatggatcaaatgcttgagagacttgcagggcaatctttctattattttttagatggatattcgggctataatcaaattgcagcggatccttatgaccaagagaagatagctttcacatgccccttcggtgtatttgcttattgccgcatgtcattcagcctatgtaatgccncaactactttccagagatgtatgatggcaatttttgctgacatgatagagacatgtattcaagtatgtatggatgatttctcttctttg

SEQ ID NO: 20076 - DNA, 393 bp, Glycine max
  unsure (1)..(393): unsure at all n locations
cttaaatgtnggaagtacacgcgtggtctattgataagatcaaagaccagcacaaggatctgcaagatatggaatctactttgaaggagctattggtattgttgttggattctttgattctgttttaagattcataggatattgtaccttaattgttgagtttctcacgaccaaggttcagctcgattaatggaactgaaaagtcttcacgaggaaagaataagaatattacagcagttgtgtgatctacaggtatttttttcccttaatactatgtacaccagtattttaactagtatttctttcctacaatgcatgtatgtgtattttctttttgcttttataaggcttgatgttcatgattggatcataacactttgaagaatttgaagt

SEQ ID NO: 20077 - DNA, 362 bp, Glycine max
ccctctcattcacatgtcccaaccttctgagtcatattttagtctttgacaacctgttgacatagactgcagcaactgatcccatgagcaatcctgcaattagagaatacatgccattcttttgtatccctctcatgaatatcaaagagccatttagaactccattctcccctttgaacacataaccttgtttgtcaaaatcactcagagaaatcaaatttctcttcaaatctaagacaagccttacattcttgatgactctctcaacaccatcatgaagcttaaacctcacagacccaactcaagtgatcttacaggacttgttgattccaagtaggattgaaccaccaacttgttcatca

SEQ ID NO: 20078 - DNA, 377 bp, Glycine max
  unsure (1)..(377): unsure at all n locations
agcttnggtcggactataccaagctctaggacccagggacggataaagatctatatatgggctcgctaagggtagagagaggaagactatagatttggatcaagtaaagtgtgttaaggatgaagaacgcaaagtcttagtgcatgaaaaagatatcaaggaaaggtggaatgtgtatttccacaacttatgtaatgatggatatggatatgactctagcagtctagacacaagagaagaggaccggaactataagtactatcgtcggattcagaaacaggaagtaaaggaagcgttgaatagaatgagtaatggtaaggcggtggggccagacaacatacctattgaagtgtggaaaactctaggagatagaggtc

SEQ ID NO: 20079 - DNA, 412 bp, Glycine max
  unsure (1)..(412): unsure at all n locations
caccacccctcactctaagccttataagnngtaangtgttgagtgacaatggtgagtcggtgggggataagcaagtgttacttacattctccatcggaaattatgttgatgaagtgctttgtgatatggttcccatggaagccagacatgtgttgcttgggagaccttggcaatatgatagagatgctgtccacaatagggtcaccaattgatattctttcttgcataaaggtaaaatggtagttctctcacctttgtctccaagtgaggtttgtgaggatcaaataaaaatgagattgaaaagagaaaaagaaaagatattcaaagtaagaaaaagtcctttgagagagaataaccacaaagaagagaaaacataagagtgaaaccaattagttataaagagagtttgtta

SEQ ID NO: 20080 - DNA, 251 bp, Glycine max
agcttgtagtatacgctaacgacaataacatttcactcggaagtccgattgagtcccgtattatatctagacgctcgcaattcaaaaccgaagctcgcagctaatgctaacgacaatagcatttcactcggaagtgagattgagtcccgcatatatcgagacgctcgaatattaaaaccgacgcttgcagcgaatgctatcgacgataacgtttcactcggaagtccgattgagtcccgtattagatcgag

SEQ ID NO: 20081 - DNA, 249 bp, Glycine max
gaccatgggaacacctctagagcgggggatgttcaatttctagcacccacatatattatgagcctgaatcggacatccgggtgacaagttgtgaccatcataatttctctacaccataccgtgctcaataacgagcgtctcgagagattacgcgcgtgaatccgacgtccgtgtgaaaggtatgaccatctgggtcgttcgagagcttccgttgggcaaaatcaagcggcccgatttattatacacctg

SEQ ID NO: 20082 - DNA, 417 bp, Glycine max
  unsure (1)..(417): unsure at all n locations
tcctcttagtagggaatatatccttcctaagatggtgccttacccagtccccttcattaagaacgagctcatttcttcctctatttcctttagtagcatacacctttggttggttcctaaccctctcatgcaacttctttacaaactctaaccttgattccccttctttatgtataaaagaagtgtcaagtgggaggggaattaggtcttagggtgttagaggattgaacccatagataacctcaaaaggggattgcttggttgttctatgaatccccctgtngtaggaaaattctacataaggaagatactaatcctaagacttatgggttcctttcagaaaagcccttaaaagggtggatagagacccattcactacctttgtttgcccatcaatttatggatgacaagtggtag

SEQ ID NO: 20083 - DNA, 515 bp, Glycine max
  unsure (1)..(515): unsure at all n locations
aggcgttttnccttgataccttcgnaggtccanccttttncttgctgtatcgactcattaacaccaagctcggtgagcactctgaagattatgacaactttcgntgatctttttgtcatcgatattntagnagagaccaatctttcttcttcaaatgtcgctcatgatatttattgtaattatcttcaatgtatgtccaaaaagttaaccttttttggacccccacaatagaaatctttgaaatatttagccatgtgttggcaagccattcatatttctttgcggagaaacatgatctattgtgtctttcggatgcttcttctatgtcttcttcttcttcttcttcttcttcttcttcttcattgaccacaatattatccaactcaacttaggtgcaaaatggtggaatttgagactttgacgcanagtcagatggtgcgtcatgctctttcattacattggacatcatntactaccctttgaagaccctcgatccatggaagggttaattggtg

SEQ ID NO: 20084 - DNA, 22 bp, Artificial Sequence
  synthetic oligonucleotide
gtgtctttcggatgcttcttct

SEQ ID NO: 20085 - DNA, 22 bp, Artificial Sequence
  synthetic oligonucleotide
caccattttgcacctaagttga
